(19) United States
(12) Patent Application Publication
(10) Pub. No.: US 2025/0194571 A1
(43) Pub. Date: Jun. 19, 2025

(54) COMPOSITIONS AND METHODS FOR DEFINING OPTIMAL TREATMENT TIMEFRAMES IN LYSOSOMAL DISEASE

(71) Applicant: Regeneron Pharmaceuticals, Inc., Tarrytown, NY (US)

(72) Inventors: Elizabeth Hwang, Great Neck, NY (US); Katherine Cygnar, New York, NY (US); Jeremy Rabinowitz, Cortlandt Manor, NY (US); Jose F. Rojas, Newburgh, NY (US); Aristides Economides, Tarrytown, NY (US)

(73) Assignee: Regeneron Pharmaceuticals, Inc., Tarrytown, NY (US)

(21) Appl. No.: 18/836,094

(22) PCT Filed: Feb. 7, 2023
(86) PCT No.: PCT/US2023/062153

§ 371 Date: Aug. 6, 2024

Related U.S. Application Data
(60) Provisional application No. 63/307,431, filed on Feb. 7, 2022.

(51) Int. Cl. A01K 67/0276; C12N 9/12

(52) U.S. Cl. CPC A01K 67/0276; C12N 9/1241; A01K 2217/075; A01K 2217/203; A01K 2227/105; A01K 2267/0306

(57) ABSTRACT

Non-human animals comprising a reverse-conditional null endogenous lysosomal storage disease gene and methods of making such non-human animals are provided. Also provided are methods of using the non-human animals for assessing reversibility of a phenotype of the lysosomal storage disease or for determining an optimal timeframe for treatment of a phenotype of the lysosomal storage disease.

### CROSS-REFERENCE TO RELATED APPLICATIONS

[0001] This application claims the benefit of U.S. Application No. 63/307,431, filed Feb. 7, 2022, which is herein incorporated by reference in its entirety for all purposes.

### REFERENCE TO A SEQUENCE LISTING SUBMITTED AS AN XML FILE VIA EFS WEB

[0002] The Sequence Listing written in file 057766-590926SEQLIST.txt is 734 kilobytes, was created on Feb. 3, 2023, and is hereby incorporated by reference.

### BACKGROUND

[0003] Mucopolysaccharidosis VI (MPS VI), also known as Maroteaux-Lamy Syndrome, is a lysosomal disease resulting from impaired function of the arylsulfatase B (ARSB) protein. This impairment causes aberrant accumulation of dermatan sulfate, a glycosaminoglycan (GAG) abundant in growth plates, cartilage, and extracellular matrix. While clinical presentation is variable in terms of age at first symptom manifestation and disease severity, MPS VI classically presents at early ages and significantly impacts the skeleton. Current treatment guidelines recommend enzyme replacement therapy, which is known to provide incomplete or ineffective recovery from the skeletal manifestations of disease. We can postulate this may be due to the inability of the exogenous enzyme to reach affected cells, or that disease may not be reversible at the time therapy is delivered. To date, no models of disease exist that separate treatment efficacy from disease reversibility. Similar issues exist with other mucopolysaccharidosis diseases and other lysosomal storage diseases.

### SUMMARY

[0004] Non-human animals, non-human animal cells, and non-human animal genomes comprising a reverse-conditional null endogenous lysosomal storage disease gene are provided, as well as methods of making and using such non-human animals, non-human animal cells, and non-human animal genomes. Also provided are reverse-conditional null endogenous lysosomal storage disease genes, nucleic acids (e.g. isolated nucleic acids) comprising reverse-conditional null endogenous lysosomal storage disease genes, nuclease agents and/or targeting vectors for use in making reverse-conditional null endogenous lysosomal storage disease genes, and methods of making and using such reverse-conditional null endogenous lysosomal storage disease genes.

[0005] In one aspect, provided are non-human animals, non-human animal cells, and non-human animal genomes in their genome a reverse-conditional null endogenous lysosomal storage disease gene. In some such non-human animals, non-human animal cells, and non-human animal genomes, the reverse-conditional null endogenous lysosomal storage disease gene is a null endogenous lysosomal storage disease gene that is converted to a functional endogenous lysosomal storage disease gene upon treatment with a recombinase. In some such non-human animals, non-human animal cells, and non-human animal genomes, a critical region of the endogenous lysosomal storage disease gene is inverted and flanked by recombinase recognition sites in the reverse-conditional null endogenous lysosomal storage disease gene, wherein the recombinase recognition sites are oriented such that the critical region is reinverted upon treatment with the recombinase. In some such non-human animals, non-human animal cells, and non-human animal genomes, the critical region comprises a coding sequence of the endogenous lysosomal storage disease gene.

[0006] In some such non-human animals, non-human animal cells, and non-human animal genomes, the recombinase is a Cre recombinase. In some such non-human animals, non-human animal cells, and non-human animal genomes, the recombinase recognition sites comprise a lox71 site and a lox66 site.

[0007] Some such non-human animals, non-human animal cells, and non-human animal genomes further comprise a genomically integrated recombinase expression cassette encoding the recombinase. In some such non-human animals, non-human animal cells, and non-human animal genomes, the genomically integrated recombinase expression cassette comprises a recombinase coding sequence operably linked to a tissue-specific promoter. In some such non-human animals, non-human animal cells, and non-human animal genomes, the recombinase is inducible. In some such non-human animals, non-human animal cells, and non-human animal genomes, the recombinase is inducible upon treatment with tamoxifen.

[0008] In some such non-human animals, non-human animal cells, and non-human animal genomes, the reverse-conditional null endogenous lysosomal storage disease gene comprises a selection cassette or a reporter gene flanked by recombinase recognition sites for a second recombinase. In some such non-human animals, non-human animal cells, and non-human animal genomes, the reverse-conditional null endogenous lysosomal storage disease gene comprises the selection cassette, wherein the selection cassette is a self-deleting selection cassette. Some such non-human animals, non-human animal cells, and non-human animal genomes do not comprise a selection cassette or a reporter gene.

[0009] In some such non-human animals, non-human animal cells, and non-human animal genomes, the non-human animal comprises the reverse-conditional null endogenous lysosomal storage disease gene in its germline. In some such non-human animals, non-human animal cells, and non-human animal genomes, the non-human animal is a mammal. In some such non-human animals, non-human animal cells, and non-human animal genomes, the non-human animal is a rodent. In some such non-human animals, non-human animal cells, and non-human animal genomes, the non-human animal is a mouse or a rat. In some such non-human animals, non-human animal cells, and non-human animal genomes, the non-human animal is the mouse.

[0010] In some such non-human animals, non-human animal cells, and non-human animal genomes, the lysosomal storage disease gene is a mucopolysaccharidosis gene.

[0011] In some such non-human animals, non-human animal cells, and non-human animal genomes, the lysosomal storage disease gene is an Arsb gene. In some such non-human animals, non-human animal cells, and non-human animal genomes, a critical region of the endogenous Arsb gene is inverted and flanked by recombinase recognition sites in the reverse-conditional null endogenous Arsb gene, wherein the recombinase recognition sites are oriented such that the critical region is reinverted upon treatment with the recombinase. In some such non-human animals, non-human animal cells, and non-human animal genomes, the critical region comprises exon 5 of the endogenous Arsb gene. In some such non-human animals, non-human animal cells, and non-human animal genomes, the non-human animal displays one or more phenotypes associated with mucopolysaccharidosis VI. In some such non-human animals, non-human animal cells, and non-human animal genomes, the non-human animal displays one or more skeletal phenotypes associated with mucopolysaccharidosis VI. In some such non-human animals, non-human animal cells, and non-human animal genomes, the non-human animal displays one or more or all of the following relative to a wild type non-human animal: (a) increased accumulation of glycosaminoglycans in the liver; (b) increased accumulation of glycosaminoglycans in the heart; (c) increased accumulation of glycosaminoglycans in the kidney; (d) decreased tibia length; (e) decreased spinal column length; (f) increased tibial growth plate width; and (g) decreased cranial length:width ratio. In some such non-human animals, non-human animal cells, and non-human animal genomes, the non-human animal displays all of the following relative to the wild type non-human animal: (a) increased accumulation of glycosaminoglycans in the liver; (b) increased accumulation of glycosaminoglycans in the heart; (c) increased accumulation of glycosaminoglycans in the kidney; (d) decreased tibia length; (e) decreased spinal column length; (f) increased tibial growth plate width; and (g) decreased cranial length:width ratio.

[0012] In some such non-human animals, non-human animal cells, and non-human animal genomes, a region comprising exon 5 of the endogenous Arsb gene is inverted and flanked by recombinase recognition sites in the reverse-conditional null endogenous Arsb gene, the recombinase recognition sites are oriented such that the region is reinverted upon treatment with the recombinase, the recombinase is a Cre recombinase, and the recombinase recognition sites comprise a lox71 site and a lox66 site, the non-human animal comprises the reverse-conditional null endogenous Arsb gene in its germline, the non-human animal is a mouse, and the non-human animal displays one or more phenotypes associated with mucopolysaccharidosis VI. Optionally, the one or more phenotypes comprise one or more or all of the following relative to a wild type non-human animal: (a) increased accumulation of glycosaminoglycans in the liver; (b) increased accumulation of glycosaminoglycans in the heart; (c) increased accumulation of glycosaminoglycans in the kidney; (d) decreased tibia length; (e) decreased spinal column length; (f) increased tibial growth plate width; and (g) decreased cranial length:width ratio. In some such non-human animals, non-human animal cells, and non-human animal genomes, the non-human animal displays the decreased tibia length, wherein the decreased tibia length is rescuable within one month or three months after treatment with the recombinase at post-natal day 7 (or earlier) but is not rescuable within one month or three months after treatment with the recombinase at post-natal day 21 (or later) or at 8-10 weeks (e.g., 8 weeks) after birth. In some such non-human animals, non-human animal cells, and non-human animal genomes, the non-human animal displays the decreased spinal column length, wherein the decreased spinal column length is rescuable within one month or three months after treatment with the recombinase at post-natal day 7 (or earlier) but is not rescuable within one month or three months after treatment with the recombinase at post-natal day 21 (or later) or at 8-10 weeks (e.g., 8 weeks) after birth. In some such non-human animals, non-human animal cells, and non-human animal genomes, the non-human animal displays the increased tibial growth plate width, wherein the increased tibial growth plate width is rescuable within one month or three months after treatment with the recombinase at post-natal day 7 (or earlier) but is not rescuable within one month or three months after treatment with the recombinase at post-natal day 21 (or later) or at 8-10 weeks (e.g., 8 weeks) after birth. In some such non-human animals, non-human animal cells, and non-human animal genomes, the non-human animal displays the decreased cranial length:width ratio, wherein the decreased cranial length:width ratio is rescuable within one month or three months after treatment with the recombinase at post-natal day 7 (or earlier) but is not rescuable within one month or three months after treatment with the recombinase at post-natal day 21 (or later) or at 8-10 weeks (e.g., 8 weeks) after birth. In some such non-human animals, non-human animal cells, and non-human animal genomes, the non-human animal displays the decreased tibia length, wherein the decreased tibia length is rescued within one month or three months after treatment with the recombinase at post-natal day 7 (or earlier). In some such non-human animals, non-human animal cells, and non-human animal genomes, the non-human animal displays the decreased tibia length, wherein the decreased tibia length is not rescued within one month or three months after treatment with the recombinase at post-natal day 21 (or later) or at 8-10 weeks (e.g., 8 weeks) after birth. In some such non-human animals, non-human animal cells, and non-human animal genomes, the non-human animal displays the decreased spinal column length, wherein the decreased spinal column length is rescued within one month or three months after treatment with the recombinase at post-natal day 7 (or earlier). In some such non-human animals, non-human animal cells, and non-human animal genomes, the non-human animal displays the decreased spinal column length, wherein the decreased spinal column length is not rescued within one month or three months after treatment with the recombinase at post-natal day 21 (or later) or at 8-10 weeks (e.g., 8 weeks) afterbirth. In some such non-human animals, non-human animal cells, and non-human animal genomes, the non-human animal displays the increased tibial growth plate width, wherein the increased tibial growth plate width is rescued within one month or three months after treatment with the recombinase at post-natal day 7 (or earlier). In some such non-human animals, non-human animal cells, and non-human animal genomes, the non-human animal displays the increased tibial growth plate width, the increased tibial growth plate width is not rescued within one month or three months after treatment with the recombinase at post-natal day 21 (or later) or at 8-10 weeks (e.g., 8 weeks) after birth. In some such non-human animals, non-human animal cells, and non-human animal genomes, the non-human animal displays the decreased cranial length:width ratio, wherein the decreased cranial length:width ratio is rescued within one month or three months after treatment with the recombinase at post-natal day 7 (or earlier). In some such non-human animals, non-human animal cells, and non-human animal genomes, the non-human animal displays the decreased cranial length:width ratio, wherein the decreased cranial length:width ratio is not rescued within one month or three months after treatment with the recombinase at post-natal day 21 (or later) or at 8-10 weeks (e.g., 8 weeks) after birth. In some such non-human animals, non-human animal cells, and non-human animal genomes, the reverse-conditional null endogenous Arsb gene comprises the sequence set forth in SEQ ID NO: 7 or 8. In some such non-human animals, non-human animal cells, and non-human animal genomes, the reverse-conditional null endogenous Arsb gene comprises the sequence set forth in SEQ ID NO: 47. In some such non-human animals, non-human animal cells, and non-human animal genomes, upon treatment the reverse-conditional null endogenous Arsb gene comprises the sequence set forth in SEQ ID NO: 9. In some such non-human animals, non-human animal cells, and non-human animal genomes, upon treatment the reverse-conditional null endogenous Arsb gene comprises the sequence set forth in SEQ ID NO: 48.

[0013] In some such non-human animals, non-human animal cells, and non-human animal genomes, the lysosomal storage disease gene is an Idua gene. In some such non-human animals, non-human animal cells, and non-human animal genomes, a critical region of the endogenous Idua gene is inverted and flanked by recombinase recognition sites in the reverse-conditional null endogenous Idua gene, wherein the recombinase recognition sites are oriented such that the critical region is reinverted upon treatment with the recombinase. In some such non-human animals, non-human animal cells, and non-human animal genomes, the critical region comprises a region from exon 2 to the stop codon of the endogenous Idua gene. In some such non-human animals, non-human animal cells, and non-human animal genomes, the non-human animal displays one or more phenotypes associated with mucopolysaccharidosis I. In some such non-human animals, non-human animal cells, and non-human animal genomes, the non-human animal displays one or more skeletal phenotypes associated with mucopolysaccharidosis I. In some such non-human animals, non-human animal cells, and non-human animal genomes, the non-human animal displays one or more neurological phenotypes associated with mucopolysaccharidosis I. In some such non-human animals, non-human animal cells, and non-human animal genomes, the non-human animal displays one or more skeletal phenotypes associated with mucopolysaccharidosis I and one or more neurological phenotypes associated with mucopolysaccharidosis I. In some such non-human animals, non-human animal cells, and non-human animal genomes, the non-human animal displays one or more or all of the following relative to a wild type non-human animal: (a) increased accumulation of glycosaminoglycans in the liver; (b) increased accumulation of glycosaminoglycans in the heart; (c) increased accumulation of glycosaminoglycans in the kidney; (d) decreased tibia length; (e) decreased spinal column length; (f) decreased ribcage width; and (g) decreased cranial length:width ratio. In some such non-human animals, non-human animal cells, and non-human animal genomes, the non-human animal displays all of the following relative to the wild type non-human animal: (a) increased accumulation of glycosaminoglycans in the liver; (b) increased accumulation of glycosaminoglycans in the heart; (c) increased accumulation of glycosaminoglycans in the kidney; (d) decreased tibia length; (e) decreased spinal column length; (f) decreased ribcage width; and (g) decreased cranial length:width ratio. In some such non-human animals, non-human animal cells, and non-human animal genomes, the non-human animal displays one or more or all of the following relative to a wild type non-human animal: (a) decreased exploratory behavior; (b) decreased anxiety-related behavior; (c) impaired long-term memory retention; and (d) increased escape latency. In some such non-human animals, non-human animal cells, and non-human animal genomes, the non-human animal displays all of the following relative to the wild type non-human animal: (a) decreased exploratory behavior; (b) decreased anxiety-related behavior; (c) impaired long-term memory retention; and (d) increased escape latency.

[0014] In some such non-human animals, non-human animal cells, and non-human animal genomes, a region comprising exon 2 to the stop codon of the endogenous Idua gene is inverted and flanked by recombinase recognition sites in the reverse-conditional null endogenous Idua gene, the recombinase recognition sites are oriented such that the region is reinverted upon treatment with the recombinase, the recombinase is a Cre recombinase, and the recombinase recognition sites comprise a lox71 site and a lox66 site, the non-human animal comprises the reverse-conditional null endogenous Idua gene in its germline, the non-human animal is a mouse, and the non-human animal displays one or more phenotypes associated with mucopolysaccharidosis I. In some such non-human animals, non-human animal cells, and non-human animal genomes, the non-human animal displays one or more skeletal phenotypes associated with mucopolysaccharidosis I. In some such non-human animals, non-human animal cells, and non-human animal genomes, the non-human animal displays one or more neurological phenotypes associated with mucopolysaccharidosis I. In some such non-human animals, non-human animal cells, and non-human animal genomes, the non-human animal displays one or more skeletal phenotypes associated with mucopolysaccharidosis I and one or more neurological phenotypes associated with mucopolysaccharidosis I. In some such non-human animals, non-human animal cells, and non-human animal genomes, the non-human animal displays one or more or all of the following relative to a wild type non-human animal: (a) increased accumulation of glycosaminoglycans in the liver; (b) increased accumulation of glycosaminoglycans in the heart; (c) increased accumulation of glycosaminoglycans in the kidney; (d) decreased tibia length; (e) decreased spinal column length; (f) decreased ribcage width; and (g) decreased cranial length:width ratio. In some such non-human animals, non-human animal cells, and non-human animal genomes, the non-human animal displays one or more or all of the following relative to a wild type non-human animal: (a) decreased exploratory behavior; (b) decreased anxiety-related behavior; (c) impaired long-term memory retention; and (d) increased escape latency. In some such non-human animals, non-human animal cells, and non-human animal genomes, the reverse-conditional null endogenous Idua gene comprises the sequence set forth in SEQ ID NO: 10 or 11. In some such non-human animals, non-human animal cells, and non-human animal genomes, the reverse-conditional null endogenous Idua gene comprises the sequence set forth in SEQ ID NO: 49. In some such non-human animals, non-human animal cells, and non-human animal genomes, upon treatment the reverse-conditional null endogenous Idua gene comprises the sequence set forth in SEQ ID NO: 12. In some such non-human animals, non-human animal cells, and non-human animal genomes, upon treatment the reverse-conditional null endogenous Idua gene comprises the sequence set forth in SEQ ID NO: 50.

[0015] In another aspect, provided are methods of assessing reversibility of a phenotype of a lysosomal storage disease. Some such methods comprise: (a) treating any of the above non-human animals comprising in their genome a reverse-conditional null endogenous lysosomal storage disease gene with the recombinase at a selected time point after birth or treating the non-human animal with a candidate therapeutic agent at the selected time point after birth; and (b) assessing the phenotype of the lysosomal storage disease after a defined time period post-treatment relative to a control non-human animal.

[0016] In some such methods, step (a) comprises treating the non-human animal with the candidate therapeutic agent at the selected time point after birth. Optionally, the candidate therapeutic agent is a protein encoded by the endogenous lysosomal storage disease gene or a nucleic acid encoding the protein. In some such methods, the control non-human animal is the non-human animal in step (a) prior to treatment with the candidate therapeutic agent. In some such methods, the control non-human animal is a second non-human animal comprising the reverse-conditional null endogenous lysosomal storage disease gene, wherein the second non-human animal has not been treated with the candidate therapeutic agent. Optionally, the second non-human animal is the same age as the non-human animal in step (a).

[0017] In some such methods, step (a) comprises treating the non-human animal with the recombinase at the selected time point after birth. In some such methods, the non-human animal further comprises a genomically integrated recombinase expression cassette encoding the recombinase, wherein the recombinase is inducible, and step (a) comprises inducing the recombinase. In some such methods, the recombinase is inducible upon treatment with tamoxifen, and step (a) comprises treating the non-human animal with tamoxifen.

[0018] In some such methods, the control non-human animal is the non-human animal in step (a) prior to treatment with the recombinase. In some such methods, the control non-human animal is a second non-human animal comprising the reverse-conditional null endogenous lysosomal storage disease gene, wherein the second non-human animal has not been treated with the recombinase. In some such methods, the second non-human animal is the same age as the non-human animal in step (a). In some such methods, step (b) further comprises assessing the phenotype of the lysosomal storage disease after a defined time period post-treatment relative to a wild type non-human animal. Optionally, the wild type non-human animal is the same age as the non-human animal in step (b).

[0019] In some such methods, the defined time period post-treatment in step (b) is at least 1 week, at least 1 month, or at least 3 months after treatment. In some such methods, the defined time period post-treatment in step (b) is between about 1 month and about 3 months after treatment.

[0020] In some such methods, the lysosomal storage disease gene is a mucopolysaccharidosis gene, and the phenotype is a mucopolysaccharidosis phenotype. In some such methods, the lysosomal storage disease gene is Arsb, and the phenotype is a mucopolysaccharidosis VI phenotype. In some such methods, the phenotype is a skeletal mucopolysaccharidosis VI phenotype. In some such methods, the phenotype comprises, relative to a wild type non-human animal: (i) increased accumulation of glycosaminoglycans in the liver; (ii) increased accumulation of glycosaminoglycans in the heart; (iii) increased accumulation of glycosaminoglycans in the kidney; (iv) decreased tibia length; (v) decreased spinal column length; (vi) increased tibial growth plate width; or (vii) decreased cranial length:width ratio. In some such methods, the phenotype comprises the decreased tibia length, the decreased spinal column length, the increased tibial growth plate width, or the decreased cranial length:width ratio. In some such methods, the phenotype comprises the decreased tibia length or the decreased spinal column length. In some such methods, the lysosomal storage disease gene is Idua, and the phenotype is a mucopolysaccharidosis I phenotype. In some such methods, the phenotype is a skeletal mucopolysaccharidosis I phenotype. In some such methods, the phenotype comprises, relative to a wild type non-human animal: (i) increased accumulation of glycosaminoglycans in the liver; (ii) increased accumulation of glycosaminoglycans in the heart; (iii) increased accumulation of glycosaminoglycans in the kidney; (iv) decreased tibia length; (v) decreased spinal column length; (vi) decreased ribcage width; or (vii) decreased cranial length:width ratio. In some such methods, the phenotype is a neurological mucopolysaccharidosis I phenotype. In some such methods, the phenotype comprises, relative to a wild type non-human animal: (a) decreased exploratory behavior; (b) decreased anxiety-related behavior; (c) impaired long-term memory retention; or (d) increased escape latency.

[0021] In another aspect, provided are methods of determining an optimal timeframe for treatment of a phenotype of a lysosomal storage disease. Some such methods comprise: (a) performing any of the above methods of assessing reversibility of a phenotype of a lysosomal storage disease a first time in a first non-human animal, wherein the first non-human animal is treated with the recombinase at a first time point after birth; (b) performing the method of step (a) a second time in a second non-human animal, wherein the second non-human animal is treated with the recombinase at a second time point after birth, wherein the second time point is different from the first time point; and (c) comparing the phenotype in step (a) with the phenotype in step (b) and selecting the time point resulting in the better amelioration of the phenotype.

[0022] In some such methods, the lysosomal storage disease gene is a mucopolysaccharidosis gene, and the phenotype type is a mucopolysaccharidosis phenotype. In some such methods, the lysosomal storage disease gene is Arsb, and the phenotype is a mucopolysaccharidosis VI phenotype. In some such methods, the phenotype is a skeletal mucopolysaccharidosis VI phenotype. In some such methods, the phenotype comprises, relative to a wild type non-human animal: (i) increased accumulation of glycosaminoglycans in the liver; (ii) increased accumulation of glycosaminoglycans in the heart; (iii) increased accumulation of glycosaminoglycans in the kidney; (iv) decreased tibia length; (v) decreased spinal column length; (vi) increased tibial growth plate width; or (vii) decreased cranial length:width ratio. In some such methods, the phenotype comprises the decreased tibia length, the decreased spinal column length, the increased tibial growth plate width, or the decreased cranial length:width ratio. In some such methods, the phenotype comprises the decreased tibia length or the decreased spinal column length. In some such methods, the lysosomal storage disease gene is Idua, and the phenotype is a mucopolysaccharidosis I phenotype. In some such methods, the phenotype is a skeletal mucopolysaccharidosis I phenotype. In some such methods, the phenotype comprises, relative to a wild type non-human animal: (i) increased accumulation of glycosaminoglycans in the liver; (ii) increased accumulation of glycosaminoglycans in the heart; (iii) increased accumulation of glycosaminoglycans in the kidney; (iv) decreased tibia length; (v) decreased spinal column length; (vi) decreased ribcage width; or (vii) decreased cranial length:width ratio. In some such methods, the phenotype is a neurological mucopolysaccharidosis I phenotype. In some such methods, the phenotype comprises, relative to a wild type non-human animal: (a) decreased exploratory behavior; (b) decreased anxiety-related behavior; (c) impaired long-term memory retention; or (d) increased escape latency.

[0023] In another aspect, provided are methods of assessing the reversibility of a phenotype of a lysosomal storage disease by a combination therapy. Some such methods comprise: (a) performing any of the above methods of assessing reversibility of a phenotype of a lysosomal storage disease a first time in a first non-human animal and a second time in a second non-human animal, wherein the first non-human animal is treated with the recombinase but not the candidate therapeutic agent, and wherein the second non-human animal is treated with the recombinase and the candidate therapeutic agent; and (b) comparing the phenotype in the first non-human animal with the phenotype in the second non-human animal to determine if the combination of the recombinase and the candidate therapeutic agent results in better amelioration of the phenotype.

[0024] In some such methods, the second non-human animal is treated with the recombinase and the candidate therapeutic agent simultaneously. In some such methods, the second non-human animal is treated with the recombinase and the candidate therapeutic agent sequentially. In some such methods, the candidate therapeutic agent is not a protein encoded by the endogenous lysosomal storage disease gene or a nucleic acid encoding the protein.

[0025] In another aspect, provided are methods of assessing the efficacy of a candidate therapeutic agent for reversing a phenotype of a lysosomal storage disease. Some such methods comprise: (a) performing any of the above methods of assessing reversibility of a phenotype of a lysosomal storage disease a first time in a first non-human animal and a second time in a second non-human animal, wherein the first non-human animal is treated with the recombinase but not the candidate therapeutic agent, and wherein the second non-human animal is treated with the candidate therapeutic agent but not the recombinase; and (b) comparing the phenotype in the first non-human animal with the phenotype in the second non-human animal to determine if the recombinase results in better amelioration of the phenotype than the candidate therapeutic agent.

[0026] In some such methods, the recombinase and the candidate therapeutic agent are administered at the same selected time point after birth, and the phenotype is assessed after the same defined time period post-treatment in the first non-human animal and the second non-human animal. In some such methods, the candidate therapeutic agent is a protein encoded by the endogenous lysosomal storage disease gene or a nucleic acid encoding the protein.

[0027] In another aspect, provided are methods of making any of the above non-human animals comprising in their genome the reverse-conditional null endogenous lysosomal storage disease gene. Some such methods comprise: (a) introducing into a non-human animal host embryo a genetically modified non-human animal embryonic stem (ES) cell comprising in its genome the reverse-conditional null endogenous lysosomal storage disease gene; and (b) gestating the non-human animal host embryo in a surrogate non-human animal mother, wherein the surrogate non-human animal mother produces an F0 progeny genetically modified non-human animal comprising the reverse-conditional null endogenous lysosomal storage disease gene. Optionally, such methods can further comprise modifying the non-human animal ES cell prior to step (a) to comprise in its genome the reverse-conditional null endogenous lysosomal storage disease gene. Some such methods comprise gestating a genetically modified non-human animal host embryo in a non-human animal surrogate mother, wherein the genetically modified non-human animal host embryo comprises in its genome the reverse-conditional null endogenous lysosomal storage disease gene, and wherein the surrogate non-human animal mother produces an F0 progeny genetically modified non-human animal comprising the reverse-conditional null endogenous lysosomal storage disease gene. Optionally, such methods can further comprise modifying a non-human animal one-cell stage embryo to generate the genetically modified non-human animal host embryo prior to the gestating step.

[0028] Non-human animals, non-human animal cells, and non-human animal genomes comprising a reverse-conditional null endogenous Arsb gene are provided, as well as methods of making and using such non-human animals, non-human animal cells, and non-human animal genomes. Also provided are reverse-conditional null endogenous Arsb genes, nucleic acids (e.g. isolated nucleic acids) comprising reverse-conditional null endogenous Arsb genes, nuclease agents and/or targeting vectors for use in making reverse-conditional null endogenous Arsb genes, and methods of making and using such reverse-conditional null endogenous Arsb genes.

[0029] In one aspect, provided are non-human animals, non-human animal cells, and non-human animal genomes in their genome a reverse-conditional null endogenous Arsb gene. In some such non-human animals, non-human animal cells, and non-human animal genomes, the reverse-conditional null endogenous Arsb gene is a null endogenous Arsb gene that is converted to a functional endogenous Arsb gene upon treatment with a recombinase. In some such non-human animals, non-human animal cells, and non-human animal genomes, a critical region of the endogenous Arsb gene is inverted and flanked by recombinase recognition sites in the reverse-conditional null endogenous Arsb gene, wherein the recombinase recognition sites are oriented such that the critical region is reinverted upon treatment with the recombinase. In some such non-human animals, non-human animal cells, and non-human animal genomes, the critical region comprises a coding sequence of the endogenous Arsb gene. In some such non-human animals, non-human animal cells, and non-human animal genomes, the critical region comprises exon 5 of the endogenous Arsb gene. In some such non-human animals, non-human animal cells, and non-human animal genomes, the recombinase is a Cre recombinase. In some such non-human animals, non-human animal cells, and non-human animal genomes, the recombinase recognition sites comprise a lox71 site and a lox66 site.

[0030] Some such non-human animals, non-human animal cells, and non-human animal genomes further comprise a genomically integrated recombinase expression cassette encoding the recombinase. In some such non-human animals, non-human animal cells, and non-human animal genomes, the genomically integrated recombinase expression cassette comprises a recombinase coding sequence operably linked to a tissue-specific promoter. In some such non-human animals, non-human animal cells, and non-human animal genomes, the recombinase is inducible. In some such non-human animals, non-human animal cells, and non-human animal genomes, the recombinase is inducible upon treatment with tamoxifen.

[0031] In some such non-human animals, non-human animal cells, and non-human animal genomes, the reverse-conditional null endogenous Arsb gene comprises a selection cassette or a reporter gene flanked by recombinase recognition sites for a second recombinase. In some such non-human animals, non-human animal cells, and non-human animal genomes, the reverse-conditional null endogenous Arsb gene comprises the selection cassette, wherein the selection cassette is a self-deleting selection cassette. In some such non-human animals, non-human animal cells, and non-human animal genomes, the non-human animal does not comprise a selection cassette or a reporter gene.

[0032] In some such non-human animals, non-human animal cells, and non-human animal genomes, the non-human animal comprises the reverse-conditional null endogenous Arsb gene in its germline. In some such non-human animals, non-human animal cells, and non-human animal genomes, the non-human animal is a mammal. In some such non-human animals, non-human animal cells, and non-human animal genomes, the non-human animal is a rodent. In some such non-human animals, non-human animal cells, and non-human animal genomes, the non-human animal is a mouse or a rat. In some such non-human animals, non-human animal cells, and non-human animal genomes, the non-human animal is the mouse.

[0033] In some such non-human animals, non-human animal cells, and non-human animal genomes, the non-human animal displays one or more phenotypes associated with mucopolysaccharidosis VI. In some such non-human animals, non-human animal cells, and non-human animal genomes, the non-human animal displays one or more skeletal phenotypes associated with mucopolysaccharidosis VI. In some such non-human animals, non-human animal cells, and non-human animal genomes, the non-human animal displays one or more or all of the following relative to a wild type non-human animal: (a) increased accumulation of glycosaminoglycans in the liver; (b) increased accumulation of glycosaminoglycans in the heart; (c) increased accumulation of glycosaminoglycans in the kidney; (d) decreased tibia length; (e) decreased spinal column length; (f) increased tibial growth plate width; and (g) decreased cranial length:width ratio. In some such non-human animals, non-human animal cells, and non-human animal genomes, the non-human animal displays all of the following relative to the wild type non-human animal: (a) increased accumulation of glycosaminoglycans in the liver; (b) increased accumulation of glycosaminoglycans in the heart; (c) increased accumulation of glycosaminoglycans in the kidney; (d) decreased tibia length; (e) decreased spinal column length; (f) increased tibial growth plate width; and (g) decreased cranial length:width ratio.

[0034] In some such non-human animals, non-human animal cells, and non-human animal genomes, a region comprising exon 5 of the endogenous Arsb gene is inverted and flanked by recombinase recognition sites in the reverse-conditional null endogenous Arsb gene, the recombinase recognition sites are oriented such that the region is reinverted upon treatment with the recombinase, the recombinase is a Cre recombinase, and the recombinase recognition sites comprise a lox71 site and a lox66 site, the non-human animal comprises the reverse-conditional null endogenous Arsb gene in its germline, the non-human animal is a mouse, and the non-human animal displays one or more phenotypes associated with mucopolysaccharidosis VI. In some such non-human animals, non-human animal cells, and non-human animal genomes, the one or more phenotypes comprise one or more or all of the following relative to a wild type non-human animal: (a) increased accumulation of glycosaminoglycans in the liver; (b) increased accumulation of glycosaminoglycans in the heart; (c) increased accumulation of glycosaminoglycans in the kidney; (d) decreased tibia length; (e) decreased spinal column length; (f) increased tibial growth plate width; and (g) decreased cranial length:width ratio. In some such non-human animals, non-human animal cells, and non-human animal genomes, the non-human animal displays the decreased tibia length, wherein the decreased tibia length is rescuable within one month or three months after treatment with the recombinase at post-natal day 7 (or earlier) but is not rescuable within one month or three months after treatment with the recombinase at post-natal day 21 (or later) or at 8-10 weeks (e.g., 8 weeks) after birth. In some such non-human animals, non-human animal cells, and non-human animal genomes, the non-human animal displays the decreased spinal column length, wherein the decreased spinal column length is rescuable within one month or three months after treatment with the recombinase at post-natal day 7 (or earlier) but is not rescuable within one month or three months after treatment with the recombinase at post-natal day 21 (or later) or at 8-10 weeks (e.g., 8 weeks) after birth. In some such non-human animals, non-human animal cells, and non-human animal genomes, the non-human animal displays the increased tibial growth plate width, wherein the increased tibial growth plate width is rescuable within one month or three months after treatment with the recombinase at post-natal day 7 (or earlier) but is not rescuable within one month or three months after treatment with the recombinase at post-natal day 21 (or later) or at 8-10 weeks (e.g., 8 weeks) after birth. In some such non-human animals, non-human animal cells, and non-human animal genomes, the non-human animal displays the decreased cranial length:width ratio, wherein the decreased cranial length:width ratio is rescuable within one month or three months after treatment with the recombinase at post-natal day 7 (or earlier) but is not rescuable within one month or three months after treatment with the recombinase at post-natal day 21 (or later) or at 8-10 weeks (e.g., 8 weeks) after birth. In some such non-human animals, non-human animal cells, and non-human animal genomes, the non-human animal displays the decreased tibia length, wherein the decreased tibia length is rescued within one month or three months after treatment with the recombinase at post-natal day 7 (or earlier). In some such non-human animals, non-human animal cells, and non-human animal genomes, the non-human animal displays the decreased tibia length, wherein the decreased tibia length is not rescued within one month or three months after treatment with the recombinase at post-natal day 21 (or later) or at 8-10 weeks (e.g., 8 weeks) after birth. In some such non-human animals, non-human animal cells, and non-human animal genomes, the non-human animal displays the decreased spinal column length, wherein the decreased spinal column length is rescued within one month or three months after treatment with the recombinase at post-natal day 7 (or earlier). In some such non-human animals, non-human animal cells, and non-human animal genomes, the non-human animal displays the decreased spinal column length, wherein the decreased spinal column length is not rescued within one month or three months after treatment with the recombinase at post-natal day 21 (or later) or at 8-10 weeks (e.g., 8 weeks) afterbirth. In some such non-human animals, non-human animal cells, and non-human animal genomes, the non-human animal displays the increased tibial growth plate width, wherein the increased tibial growth plate width is rescued within one month or three months after treatment with the recombinase at post-natal day 7 (or earlier). In some such non-human animals, non-human animal cells, and non-human animal genomes, the non-human animal displays the increased tibial growth plate width, wherein the increased tibial growth plate width is not rescued within one month or three months after treatment with the recombinase at post-natal day 21 (or later) or at 8-10 weeks (e.g., 8 weeks) after birth. In some such non-human animals, non-human animal cells, and non-human animal genomes, the non-human animal displays the decreased cranial length:width ratio, wherein the decreased cranial length:width ratio is rescued within one month or three months after treatment with the recombinase at post-natal day 7 (or earlier). In some such non-human animals, non-human animal cells, and non-human animal genomes, the non-human animal displays the decreased cranial length:width ratio, wherein the decreased cranial length:width ratio is not rescued within one month or three months after treatment with the recombinase at post-natal day 21 (or later) or at 8-10 weeks (e.g., 8 weeks) after birth. In some such non-human animals, non-human animal cells, and non-human animal genomes, the reverse-conditional null endogenous Arsb gene comprises the sequence set forth in SEQ ID NO: 7 or 8. In some such non-human animals, non-human animal cells, and non-human animal genomes, the reverse-conditional null endogenous Arsb gene comprises the sequence set forth in SEQ ID NO: 47. In some such non-human animals, non-human animal cells, and non-human animal genomes, upon treatment the reverse-conditional null endogenous Arsb gene comprises the sequence set forth in SEQ ID NO: 9. In some such non-human animals, non-human animal cells, and non-human animal genomes, upon treatment the reverse-conditional null endogenous Arsb gene comprises the sequence set forth in SEQ ID NO: 48.

[0035] In another aspect, provided are methods of assessing reversibility of a phenotype of mucopolysaccharidosis VI. Some such methods comprise: (a) treating any of the above non-human animals comprising in their genome a reverse-conditional null endogenous Arsb gene with the recombinase at a selected time point after birth or treating the non-human animal with a candidate therapeutic agent at the selected time point after birth; and (b) assessing the phenotype of mucopolysaccharidosis VI after a defined time period post-treatment relative to a control non-human animal.

[0036] In some such methods, step (a) comprises treating the non-human animal with the candidate therapeutic agent at the selected time point after birth. Optionally, the candidate therapeutic agent is a protein encoded by the endogenous Arsb gene or a nucleic acid encoding the protein. In some such methods, the control non-human animal is the non-human animal in step (a) prior to treatment with the candidate therapeutic agent. In some such methods, the control non-human animal is a second non-human animal comprising the reverse-conditional null endogenous Arsb gene, wherein the second non-human animal has not been treated with the candidate therapeutic agent. Optionally, the second non-human animal is the same age as the non-human animal in step (a).

[0037] In some such methods, step (a) comprises treating the non-human animal with the recombinase at the selected time point after birth. In some such methods, the non-human animal further comprises a genomically integrated recombinase expression cassette encoding the recombinase, wherein the recombinase is inducible, and step (a) comprises inducing expression of the recombinase. In some such methods, the recombinase is inducible upon treatment with tamoxifen, and step (a) comprises treating the non-human animal with tamoxifen.

[0038] In some such methods, the control non-human animal is the non-human animal in step (a) prior to treatment with the recombinase. In some such methods, the control non-human animal is a second non-human animal comprising the reverse-conditional null endogenous Arsb gene, wherein the second non-human animal has not been treated with the recombinase. In some such methods, the second non-human animal is the same age as the non-human animal in step (a). In some such methods, step (b) further comprises assessing the phenotype of mucopolysaccharidosis VI after a defined time period post-treatment relative to a wild type non-human animal. Optionally, the wild type non-human animal is the same age as the non-human animal in step (b).

[0039] In some such methods, the defined time period post-treatment in step (b) is at least 1 week, at least 1 month, or at least 3 months after treatment. In some such methods, the defined time period post-treatment in step (b) is between about 1 month and about 3 months after treatment.

[0040] In some such methods, the phenotype is a skeletal phenotype. In some such methods, the phenotype comprises, relative to a wild type non-human animal: (i) increased accumulation of glycosaminoglycans in the liver; (ii) increased accumulation of glycosaminoglycans in the heart; (iii) increased accumulation of glycosaminoglycans in the kidney; (iv) decreased tibia length; (v) decreased spinal column length; (vi) increased tibial growth plate width; or (vii) decreased cranial length:width ratio. In some such methods, the phenotype comprises the decreased tibia length, the decreased spinal column length, the increased tibial growth plate width, or the decreased cranial length:width ratio. In some such methods, the phenotype comprises the decreased tibia length or the decreased spinal column length.

[0041] In another aspect, provided are methods of determining an optimal timeframe for treatment of a phenotype of mucopolysaccharidosis VI. Some such methods comprise: (a) performing any of the above methods of assessing reversibility of a phenotype of mucopolysaccharidosis VI a first time in a first non-human animal, wherein the first non-human animal is treated with the recombinase at a first time point after birth; (b) performing the method of step (a) a second time in a second non-human animal, wherein the second non-human animal is treated with the recombinase at a second time point after birth, wherein the second time point is different from the first time point; and (c) comparing the phenotype in step (a) with the phenotype in step (b) and selecting the time point resulting in the better amelioration of the phenotype.

[0042] In some such methods, the phenotype is a skeletal phenotype. In some such methods, the phenotype comprises, relative to a wild type non-human animal: (i) increased accumulation of glycosaminoglycans in the liver; (ii) increased accumulation of glycosaminoglycans in the heart; (iii) increased accumulation of glycosaminoglycans in the kidney; (iv) decreased tibia length; (v) decreased spinal column length; (vi) increased tibial growth plate width; or (vii) decreased cranial length:width ratio. In some such methods, the phenotype comprises the decreased tibia length, the decreased spinal column length, the increased tibial growth plate width, or the decreased cranial length:width ratio. In some such methods, the phenotype comprises the decreased tibia length or the decreased spinal column length.

[0043] In another aspect, provided are methods of assessing the reversibility of a phenotype of mucopolysaccharidosis VI by a combination therapy. Some such methods comprise: (a) performing any of the above methods of assessing reversibility of a phenotype of mucopolysaccharidosis VI a first time in a first non-human animal and a second time in a second non-human animal, wherein the first non-human animal is treated with the recombinase but not the candidate therapeutic agent, and wherein the second non-human animal is treated with the recombinase and the candidate therapeutic agent; and (b) comparing the phenotype in the first non-human animal with the phenotype in the second non-human animal to determine if the combination of the recombinase and the candidate therapeutic agent results in better amelioration of the phenotype.

[0044] In some such methods, the second non-human animal is treated with the recombinase and the candidate therapeutic agent simultaneously. In some such methods, the second non-human animal is treated with the recombinase and the candidate therapeutic agent sequentially. In some such methods, the candidate therapeutic agent is not a protein encoded by the endogenous Arsb gene or a nucleic acid encoding the protein.

[0045] In another aspect, provided are methods of assessing the efficacy of a candidate therapeutic agent for reversing a phenotype of mucopolysaccharidosis VI. Some such methods comprise: (a) performing any of the above methods of assessing reversibility of a phenotype of mucopolysaccharidosis VI a first time in a first non-human animal and a second time in a second non-human animal, wherein the first non-human animal is treated with the recombinase but not the candidate therapeutic agent, and wherein the second non-human animal is treated with the candidate therapeutic agent but not the recombinase; and (b) comparing the phenotype in the first non-human animal with the phenotype in the second non-human animal to determine if the recombinase results in better amelioration of the phenotype than the candidate therapeutic agent.

[0046] In some such methods, the recombinase and the candidate therapeutic agent are administered at the same selected time point after birth, and the phenotype is assessed after the same defined time period post-treatment in the first non-human animal and the second non-human animal. In some such methods, the candidate therapeutic agent is a protein encoded by the endogenous Arsb gene or a nucleic acid encoding the protein.

[0047] In another aspect, provided are methods of making any of the above non-human animals comprising in their genome a reverse-conditional null endogenous Arsb gene. Some such methods comprise: (a) introducing into a non-human animal host embryo a genetically modified non-human animal embryonic stem (ES) cell comprising in its genome the reverse-conditional null endogenous Arsb gene; and (b) gestating the non-human animal host embryo in a surrogate non-human animal mother, wherein the surrogate non-human animal mother produces an F0 progeny genetically modified non-human animal comprising the reverse-conditional null endogenous Arsb gene. Optionally, such methods further comprises modifying the non-human animal ES cell prior to step (a) to comprise in its genome the reverse-conditional null endogenous Arsb gene. Some such methods comprise gestating a genetically modified non-human animal host embryo in a non-human animal surrogate mother, wherein the genetically modified non-human animal host embryo comprises in its genome the reverse-conditional null endogenous Arsb gene, and wherein the surrogate non-human animal mother produces an F0 progeny genetically modified non-human animal comprising the reverse-conditional null endogenous Arsb gene. Optionally, such methods further comprise modifying a non-human animal one-cell stage embryo to generate the genetically modified non-human animal host embryo prior to the gestating step.

[0048] Non-human animals, non-human animal cells, and non-human animal genomes comprising a reverse-conditional null endogenous Idua gene are provided, as well as methods of making and using such non-human animals, non-human animal cells, and non-human animal genomes. Also provided are reverse-conditional null endogenous Idua genes, nucleic acids (e.g. isolated nucleic acids) comprising reverse-conditional null endogenous Idua genes, nuclease agents and/or targeting vectors for use in making reverse-conditional null endogenous Idua genes, and methods of making and using such reverse-conditional null endogenous Idua genes.

[0049] In one aspect, provided are non-human animals, non-human animal cells, and non-human animal genomes in their genome a reverse-conditional null endogenous Idua gene. In some such non-human animals, non-human animal cells, and non-human animal genomes, the reverse-conditional null endogenous Idua gene is a null endogenous Idua gene that is converted to a functional endogenous Idua gene upon treatment with a recombinase. In some such non-human animals, non-human animal cells, and non-human animal genomes, a critical region of the endogenous Idua gene is inverted and flanked by recombinase recognition sites in the reverse-conditional null endogenous Idua gene, wherein the recombinase recognition sites are oriented such that the critical region is reinverted upon treatment with the recombinase. In some such non-human animals, non-human animal cells, and non-human animal genomes, the critical region comprises a coding sequence of the endogenous Idua gene. In some such non-human animals, non-human animal cells, and non-human animal genomes, the critical region comprises a region from exon 2 to the stop codon of the endogenous Idua gene. In some such non-human animals, non-human animal cells, and non-human animal genomes, the recombinase is a Cre recombinase. In some such non-human animals, non-human animal cells, and non-human animal genomes, the recombinase recognition sites comprise a lox71 site and a lox66 site.

[0050] Some such non-human animals, non-human animal cells, and non-human animal genomes further comprise a genomically integrated recombinase expression cassette encoding the recombinase. In some such non-human animals, non-human animal cells, and non-human animal genomes, the genomically integrated recombinase expression cassette comprises a recombinase coding sequence operably linked to a tissue-specific promoter. In some such non-human animals, non-human animal cells, and non-human animal genomes, the recombinase is inducible. In some such non-human animals, non-human animal cells, and non-human animal genomes, the recombinase is inducible upon treatment with tamoxifen.

[0051] In some such non-human animals, non-human animal cells, and non-human animal genomes, the reverse-conditional null endogenous Idua gene comprises a selection cassette or a reporter gene flanked by recombinase recognition sites for a second recombinase. In some such non-human animals, non-human animal cells, and non-human animal genomes, the reverse-conditional null endogenous Idua gene comprises the selection cassette, wherein the selection cassette is a self-deleting selection cassette. Some such non-human animals, non-human animal cells, and non-human animal genomes do not comprise a selection cassette or a reporter gene.

[0052] In some such non-human animals, non-human animal cells, and non-human animal genomes, the non-human animal comprises the reverse-conditional null endogenous Idua gene in its germline. In some such non-human animals, non-human animal cells, and non-human animal genomes, the non-human animal is a mammal. In some such non-human animals, non-human animal cells, and non-human animal genomes, the non-human animal is a rodent. In some such non-human animals, non-human animal cells, and non-human animal genomes, the non-human animal is a mouse or a rat. In some such non-human animals, non-human animal cells, and non-human animal genomes, the non-human animal is the mouse.

[0053] In some such non-human animals, non-human animal cells, and non-human animal genomes, the non-human animal displays one or more phenotypes associated with mucopolysaccharidosis I. In some such non-human animals, non-human animal cells, and non-human animal genomes, the non-human animal displays one or more skeletal phenotypes associated with mucopolysaccharidosis I. In some such non-human animals, non-human animal cells, and non-human animal genomes, the non-human animal displays one or more neurological phenotypes associated with mucopolysaccharidosis I. In some such non-human animals, non-human animal cells, and non-human animal genomes, the non-human animal displays one or more skeletal phenotypes associated with mucopolysaccharidosis I and one or more neurological phenotypes associated with mucopolysaccharidosis I.

[0054] In some such non-human animals, non-human animal cells, and non-human animal genomes, a region comprising exon 2 to the stop codon of the endogenous Idua gene is inverted and flanked by recombinase recognition sites in the reverse-conditional null endogenous Idua gene, the recombinase recognition sites are oriented such that the region is reinverted upon treatment with the recombinase, the recombinase is a Cre recombinase, and the recombinase recognition sites comprise a lox71 site and a lox66 site, the non-human animal comprises the reverse-conditional null endogenous Idua gene in its germline, the non-human animal is a mouse, and the non-human animal displays one or more phenotypes associated with mucopolysaccharidosis I. In some such non-human animals, non-human animal cells, and non-human animal genomes, the non-human animal displays one or more skeletal phenotypes associated with mucopolysaccharidosis I. In some such non-human animals, non-human animal cells, and non-human animal genomes, the non-human animal displays one or more neurological phenotypes associated with mucopolysaccharidosis I. In some such non-human animals, non-human animal cells, and non-human animal genomes, the non-human animal displays one or more skeletal phenotypes associated with mucopolysaccharidosis I and one or more neurological phenotypes associated with mucopolysaccharidosis I. In some such non-human animals, non-human animal cells, and non-human animal genomes, the reverse-conditional null endogenous Idua gene comprises the sequence set forth in SEQ ID NO: 10 or 11. In some such non-human animals, non-human animal cells, and non-human animal genomes, the reverse-conditional null endogenous Idua gene comprises the sequence set forth in SEQ ID NO: 49. In some such non-human animals, non-human animal cells, and non-human animal genomes, upon treatment the reverse-conditional null endogenous Idua gene comprises the sequence set forth in SEQ ID NO: 12. In some such non-human animals, non-human animal cells, and non-human animal genomes, upon treatment the reverse-conditional null endogenous Idua gene comprises the sequence set forth in SEQ ID NO: 50.

[0055] In another aspect, provided are methods of assessing reversibility of a phenotype of mucopolysaccharidosis I. Some such methods comprise: (a) treating any of the above non-human animals comprising in their genome a reverse-conditional null endogenous Idua gene with the recombinase at a selected time point after birth or treating the non-human animal with a candidate therapeutic agent at the selected time point after birth; and (b) assessing the phenotype of mucopolysaccharidosis I after a defined time period post-treatment relative to a control non-human animal.

[0056] In some such methods, step (a) comprises treating the non-human animal with the candidate therapeutic agent at the selected time point after birth. Optionally, the candidate therapeutic agent is a protein encoded by the endogenous Idua gene or a nucleic acid encoding the protein. In some such methods, the control non-human animal is the non-human animal in step (a) prior to treatment with the candidate therapeutic agent. In some such methods, the control non-human animal is a second non-human animal comprising the reverse-conditional null endogenous Idua gene, wherein the second non-human animal has not been treated with the candidate therapeutic agent. Optionally, the second non-human animal is the same age as the non-human animal in step (a).

[0057] In some such methods, step (a) comprises treating the non-human animal with the recombinase at the selected time point after birth. In some such methods, the non-human animal further comprises a genomically integrated recombinase expression cassette encoding the recombinase, wherein the recombinase is inducible, and step (a) comprises inducing expression of the recombinase. In some such methods, the recombinase is inducible upon treatment with tamoxifen, and step (a) comprises treating the non-human animal with tamoxifen.

[0058] In some such methods, the control non-human animal is the non-human animal in step (a) prior to treatment with the recombinase. In some such methods, the control non-human animal is a second non-human animal comprising the reverse-conditional null endogenous Idua gene, wherein the second non-human animal has not been treated with the recombinase. In some such methods, the second non-human animal is the same age as the non-human animal in step (a). In some such methods, step (b) further comprises assessing the phenotype of mucopolysaccharidosis I after a defined time period post-treatment relative to a wild type non-human animal. Optionally, the wild type non-human animal is the same age as the non-human animal in step (b).

[0059] In some such methods, the defined time period post-treatment in step (b) is at least 1 week, at least 1 month, or at least 3 months after treatment. In some such methods, the defined time period post-treatment in step (b) is between about 1 month and about 3 months after treatment.

[0060] In some such methods, the phenotype is a skeletal phenotype. In some such methods, the phenotype is a neurological phenotype.

[0061] In another aspect, provided are methods of determining an optimal timeframe for treatment of a phenotype of mucopolysaccharidosis I. Some such methods comprise: (a) performing any of the above methods of assessing reversibility of a phenotype of mucopolysaccharidosis I a first time in a first non-human animal, wherein the first non-human animal is treated with the recombinase at a first time point after birth; (b) performing the method of step (a) a second time in a second non-human animal, wherein the second non-human animal is treated with the recombinase at a second time point after birth, wherein the second time point is different from the first time point; and (c) comparing the phenotype in step (a) with the phenotype in step (b) and selecting the time point resulting in the better amelioration of the phenotype. In some such methods, the phenotype is a skeletal phenotype. In some such methods, the phenotype is a neurological phenotype.

[0062] In another aspect, provided are methods of assessing the reversibility of a phenotype of mucopolysaccharidosis I by a combination therapy. Some such methods comprise: (a) performing any of the above methods of assessing reversibility of a phenotype of mucopolysaccharidosis I a first time in a first non-human animal and a second time in a second non-human animal, wherein the first non-human animal is treated with the recombinase but not the candidate therapeutic agent, and wherein the second non-human animal is treated with the recombinase and the candidate therapeutic agent; and (b) comparing the phenotype in the first non-human animal with the phenotype in the second non-human animal to determine if the combination of the recombinase and the candidate therapeutic agent results in better amelioration of the phenotype.

[0063] In some such methods, the second non-human animal is treated with the recombinase and the candidate therapeutic agent simultaneously. In some such methods, the second non-human animal is treated with the recombinase and the candidate therapeutic agent sequentially. In some such methods, the candidate therapeutic agent is not a protein encoded by the endogenous Idua gene or a nucleic acid encoding the protein.

[0064] In another aspect, provided are methods of assessing the efficacy of a candidate therapeutic agent for reversing a phenotype of mucopolysaccharidosis I. Some such methods comprise: (a) performing any of the above methods of assessing reversibility of a phenotype of mucopolysaccharidosis I a first time in a first non-human animal and a second time in a second non-human animal, wherein the first non-human animal is treated with the recombinase but not the candidate therapeutic agent, and wherein the second non-human animal is treated with the candidate therapeutic agent but not the recombinase; and (b) comparing the phenotype in the first non-human animal with the phenotype in the second non-human animal to determine if the recombinase results in better amelioration of the phenotype than the candidate therapeutic agent.

[0065] In some such methods, the recombinase and the candidate therapeutic agent are administered at the same selected time point after birth, and the phenotype is assessed after the same defined time period post-treatment in the first non-human animal and the second non-human animal. In some such methods, the candidate therapeutic agent is a protein encoded by the endogenous Idua gene or a nucleic acid encoding the protein.

[0066] In another aspect, provided are methods of making any of the above non-human animals comprising in their genome a reverse-conditional null endogenous Idua gene. Some such methods comprise: (a) introducing into a non-human animal host embryo a genetically modified non-human animal embryonic stem (ES) cell comprising in its genome the reverse-conditional null endogenous Idua gene; and (b) gestating the non-human animal host embryo in a surrogate non-human animal mother, wherein the surrogate non-human animal mother produces an F0 progeny genetically modified non-human animal comprising the reverse-conditional null endogenous Idua gene. Optionally, some such methods further comprise modifying the non-human animal ES cell prior to step (a) to comprise in its genome the reverse-conditional null endogenous Idua gene. Some such methods comprise gestating a genetically modified non-human animal host embryo in a non-human animal surrogate mother, wherein the genetically modified non-human animal host embryo comprises in its genome the reverse-conditional null endogenous Idua gene, and wherein the surrogate non-human animal mother produces an F0 progeny genetically modified non-human animal comprising the reverse-conditional null endogenous Idua gene. Optionally, some such methods further comprise modifying a non-human animal one-cell stage embryo to generate the genetically modified non-human animal host embryo prior to the gestating step.

### BRIEF DESCRIPTION OF THE FIGURES

[0067] FIG. 1 (not to scale) shows a schematic of the targeting scheme for generation of Arsb conditional by inversion (COIN) mice. The top portion of the figure shows the endogenous wild type mouse Arsb locus zoomed into exon 5. The bottom portion of the figure shows the targeted allele with or without the self-deleting selection cassette, and the cassette-deleted targeted allele after rescue by Cre recombinase.

[0068] FIG. 2 (not to scale) shows a schematic of the TAQMAN® assays for screening of the Arsb COIN allele. Gain-of-allele (GOA) assays include GOA2, GOA1, DreU, and Neo. Loss-of-allele (LOA) assays include mTU and mTD.

[0069] FIG. 3 shows skeletons from 18-19-week old female wild type and Arsb COIN (KO) mice.

[0070] FIG. 4 shows body weights of 18-19-week old female wild type and Arsb COIN (KO) mice. *p<0.05, **p<0.01, ***p<0.001, ****p<0.0001; ns=not significant.

[0071] FIG. 5 shows left tibia lengths in 18-19-week old female wild type and Arsb COIN (KO) mice. *p<0.05, **p<0.01, ***p<0.001, ****p<0.0001; ns=not significant.

[0072] FIG. 6 shows spinal column (L2-L6) lengths in 18-19-week old female wild type and Arsb COIN (KO) mice. *p<0.05, **p<0.01, ***p<0.001, ****p<0.0001; ns=not significant.

[0073] FIG. 7 shows cranial length:width ratios in 18-19-week old female wild type and Arsb COIN (KO) mice. *p<0.05, **p<0.01, ***p<0.001, ****p<0.0001; ns=not significant.

[0074] FIG. 8 shows glycosaminoglycan (GAG) accumulation in liver, heart, spinal cord, serum, spleen, and kidney in 18-19-week old female wild type and Arsb COIN (KO) mice. *p<0.05, **p<0.01, ***p<0.001, ****p<0.0001; ns=not significant.

[0075] FIG. 9 shows a schematic for an experimental design to assess phenotype reversibility at different time points using the Arsb COIN mice.

[0076] FIG. 10 shows residual glycosaminoglycans (GAGs) in liver, heart, and kidney in wild type adult mice (8-10 weeks), Arsb COIN (KO) adult mice, and Arsb COIN* (rescue) adult mice three months after tamoxifen dosing. *p<0.05, **p<0.01, ***p<0.001, ****p<0.0001; ns=not significant.

[0077] FIG. 11 shows left tibia in wild type adult mice, Arsb COIN (KO) adult mice, and Arsb COIN* (rescue) adult mice one month and three months after tamoxifen dosing. *p<0.05, **p<0.01, ***p<0.001, ****p<0.0001; ns=not significant.

[0078] FIG. 12 shows spinal column (L2-L6) lengths in wild type adult mice, Arsb COIN (KO) adult mice, and Arsb COIN* (rescue) adult mice one month and three months after tamoxifen dosing. *p<0.05, **p<0.01, ***p<0.001, ****p<0.0001; ns=not significant.

[0079] FIG. 13 shows cranial length:width ratios in wild type mice, Arsb COIN (KO) mice, and Arsb COIN* (rescue) mice one month and three months after tamoxifen dosing at 8-10 weeks afterbirth. *p<0.05, **p<0.01, ***p<0.001, ****p<0.0001; ns=not significant.

[0080] FIG. 14 shows tibial growth plate widths in wild type mice, Arsb COIN (KO) mice, and Arsb COIN* (rescue) mice one month and three months after tamoxifen dosing at 8-10 weeks afterbirth. *p<0.05, **p<0.01, ***p<0.001, ****p<0.0001; ns=not significant.

[0081] FIG. 15 shows trabecular bone parameters including trabecular bone volume, trabecular structural model index, trabecular thickness, trabecular separation, and trabecular number in wild type mice, Arsb COIN (KO) mice, and Arsb COIN* (rescue) mice one month after tamoxifen dosing at 8-10 weeks after birth. *p<0.05, **p<0.01, ***p<0.001, ****p<0.0001; ns=not significant. The structural model index is an estimate of the shape of trabeculae (how rod- or plate-like). A value of zero represents a perfect plate, while three represents a cylindrical rod. A perfect sphere would have a value of four. The geometry of trabeculae has an effect on how they behave as load bearing structures and their contribution to whole bone strength. The trabecular thickness is the mean thickness of the trabeculae, assessed using direct 3D methods (mm). The trabecular separation is the mean distance between the trabeculae, assessed using direct 3D methods (mm). The trabecular number is the measure of the average number of trabeculae per unit length (1/mm).

[0082] FIG. 16 shows residual glycosaminoglycans (GAGs) in liver, heart, and kidney in wild type mice, Arsb COIN (KO) mice, and Arsb COIN* (rescue) mice three months after tamoxifen dosing at postnatal day 21. *p<0.05, **p<0.01, ***p<0.001, ****p<0.0001; ns=not significant.

[0083] FIG. 17 shows left tibia lengths in wild type mice, Arsb COIN (KO) mice, and Arsb COIN* (rescue) mice one month and three months after tamoxifen dosing at postnatal day 21. *p<0.05, **p<0.01, ***p<0.001, ****p<0.0001; ns=not significant.

[0084] FIG. 18 shows spinal column (L2-L6) lengths in wild type mice, Arsb COIN (KO) mice, and Arsb COIN* (rescue) mice one month and three months after tamoxifen dosing at postnatal day 21. *p<0.05, **p<0.01, ***p<0.001, ****p<0.0001; ns=not significant.

[0085] FIG. 19 shows cranial length:width ratios in wild type mice, Arsb COIN (KO) mice, and Arsb COIN* (rescue) mice one month and three months after tamoxifen dosing at postnatal day 21. *p<0.05, **p<0.01, ***p<0.001, ****p<0.0001; ns=not significant.

[0086] FIG. 20 shows tibial growth plate widths in wild type mice, Arsb COIN (KO) mice, and Arsb COIN* (rescue) mice one month and three months after tamoxifen dosing at postnatal day 21. *p<0.05, **p<0.01, ***p<0.001, ****p<0.0001; ns=not significant.

[0087] FIG. 21 shows residual glycosaminoglycans (GAGs) in liver, heart, and kidney in wild type mice, Arsb COIN (KO) mice, and Arsb COIN* (rescue) mice one month after tamoxifen dosing at postnatal day 7. *p<0.05, **p<0.01, ***p<0.001, ****p<0.0001; ns=not significant.

[0088] FIG. 22 shows residual glycosaminoglycans (GAGs) in liver, heart, and kidney in wild type mice, Arsb COIN (KO) mice, and Arsb COIN* (rescue) mice three months after tamoxifen dosing at postnatal day 7. *p<0.05, **p<0.01, ***p<0.001, ****p<0.0001; ns=not significant.

[0089] FIG. 23 shows skeletons in wild type mice, Arsb COIN (KO) mice, and Arsb COIN* (rescue) mice three months after tamoxifen dosing at postnatal day 7.

[0090] FIG. 24 shows left tibia lengths in wild type mice, Arsb COIN (KO) mice, and Arsb COIN* (rescue) mice one month and three months after tamoxifen dosing at postnatal day 7. *p<0.05, **p<0.01, ***p<0.001, ****p<0.0001; ns=not significant.

[0091] FIG. 25 shows left spinal column (L2-L6) lengths in wild type mice, Arsb COIN (KO) mice, and Arsb COIN* (rescue) mice one month and three months after tamoxifen dosing at postnatal day 7. *p<0.05, **p<0.01, ***p<0.001, ****p<0.0001; ns=not significant.

[0092] FIG. 26 shows cranial length:width ratios in wild type mice, Arsb COIN (KO) mice, and Arsb COIN* (rescue) mice one month and three months after tamoxifen dosing at postnatal day 7. *p<0.05, **p<0.01, ***p<0.001, ****p<0.0001; ns=not significant.

[0093] FIG. 27 shows tibial growth plate widths in wild type mice, Arsb COIN (KO) mice, and Arsb COIN* (rescue) mice three months after tamoxifen dosing at postnatal day 7. *p<0.05, **p<0.01, ***p<0.001, ****p<0.0001; ns=not significant.

[0094] FIG. 28 shows alcian blue staining images of tibial growth plate widths in wild type mice, Arsb COIN (KO) mice, and Arsb COIN* (rescue) mice one month and three months after tamoxifen dosing at postnatal day 7.

[0095] FIG. 29 shows a schematic for an experimental design to assess phenotype reversibility at different time points using the Arsb COIN mice compared to enzyme replacement therapy (ERT).

[0096] FIG. 30 shows residual glycosaminoglycans (GAGs) in liver, heart, and kidney in wild type adult mice (6-8 weeks), Arsb COIN (KO) adult mice, Arsb COIN (KO) adult mice+ERT, and COIN* (rescue) adult mice one month after tamoxifen dosing. *p<0.05, **p<0.01, ***p<0.001, ****p<0.0001; ns=not significant.

[0097] FIG. 31 shows left tibia lengths (left panel) and spinal column (L2-L6) lengths (right panel) in wild type adult mice, Arsb COIN (KO) adult mice, Arsb COIN (KO) adult mice +ERT, and Arsb COIN* (rescue) adult mice one month after tamoxifen dosing. *p<0.05, **p<0.01, ***p<0.001, ****p<0.0001; ns=not significant.

[0098] FIG. 32 shows images of tibial growth plates (alcian blue stain) in wild type adult mice, Arsb COIN (KO) adult mice, Arsb COIN (KO) adult mice+ERT, and Arsb COIN* (rescue) adult mice one month after tamoxifen dosing.

[0099] FIG. 33 shows growth plate widths in wild type adult mice, Arsb COIN (KO) adult mice, Arsb COIN (KO) adult mice+ERT, and Arsb COIN* (rescue) adult mice one month after tamoxifen dosing. *p<0.05, **p<0.01, ***p<0.001, ****p<0.0001; ns=not significant.

[0100] FIGS. 34A-34C show Arsb COIN allele recombination rates and transcript abundance in peripheral organs when tamoxifen is delivered at P56-P70 in liver (FIG. 34A), heart (FIG. 34B), and kidney (FIG. 34C). Percentage recombination is assessed as ΔCt of Arsb Lox71 specific sequence compared to a serial standard, with GAPDH as a reference. Transcript abundance is assessed as ΔΔCt against WT samples as references. Data are shown as the mean±SD (n=4 to 9). Two-way ANOVAs were performed for comparison, as indicated.

[0101] FIGS. 35A-35C show restoration of Arsb expression at P7 improves femoral bone mass. FIG. 35A shows high resolution microCT images of femoral distal metaphyses at 3 months post-tamoxifen treatment. FIG. 35B shows quantification of trabecular readouts.

[0102] FIG. 35C shows quantification of cortical readouts. Data are shown as the mean±SD (n=8 to 17). Repeated measures one-way ANOVAs were performed, as indicated. *p<0.05, **p<0.01, ***p<0.001, ****p<0.0001.

[0103] FIG. 36 (not to scale) shows a schematic of the targeting scheme for generation of Idua conditional by inversion (COIN) mice. The top portion of the figure shows the endogenous wild type mouse Idua locus. The bottom portion of the figure shows the targeted allele with or without the self-deleting selection cassette, and the cassette-deleted targeted allele after rescue by Cre recombinase.

[0104] FIG. 37 (not to scale) shows a schematic of the TAQMAN® assays for screening of the Arsb COIN allele. Loss-of-allele (LOA) assays include mTU and mTD. Retention assays include mretU and mretD.

[0105] FIG. 38 shows left tibia lengths in 14-week old male and female wild type and Idua COIN (KO) mice. *p<0.05, **p<0.01, ***p<0.001, ****p<0.0001; ns=not significant.

[0106] FIG. 39 shows spinal column (L2-L6) lengths in 14-week old male and female wild type and Idua COIN (KO) mice. *p<0.05, **p<0.01, ***p<0.001, ****p<0.0001; ns=not significant.

[0107] FIG. 40 shows cranial length:width ratios in 14-week old male and female wild type and Idua COIN (KO) mice. *p<0.05, **p<0.01, ***p<0.001, ****p<0.0001; ns=not significant.

[0108] FIG. 41 shows last lumbar ribcage width in 14-week old male and female wild type and Idua COIN (KO) mice. *p<0.05, **p<0.01, ***p<0.001, ****p<0.0001; ns=not significant.

[0109] FIG. 42 shows left zygomatic arch length:width ratios in 14-week old male and female wild type and Idua COIN (KO) mice. *p<0.05, **p<0.01, ***p<0.001, ****p<0.0001; ns=not significant.

[0110] FIG. 43 shows a schematic for an experimental design to assess phenotype reversibility at different time points using the Idua COIN mice.

[0111] FIG. 44 shows residual glycosaminoglycans (GAGs) in liver, heart, kidney, spleen, cerebellum, and cerebrum in wild type adult mice (6-8 weeks), Idua COIN (KO) adult mice, COIN* (rescue) adult mice, and heterozygous (WT/COIN) adult mice one month after tamoxifen dosing. *p<0.05, **p<0.01, ***p<0.001, ****p<0.0001; ns=not significant.

### DEFINITIONS

[0112] The terms “protein,” “polypeptide,” and “peptide,” used interchangeably herein, include polymeric forms of amino acids of any length, including coded and non-coded amino acids and chemically or biochemically modified or derivatized amino acids. The terms also include polymers that have been modified, such as polypeptides having modified peptide backbones. The term “domain” refers to any part of a protein or polypeptide having a particular function or structure.

[0113] Proteins are said to have an “N-terminus” (amino-terminus) and a “C-terminus” (carboxy-terminus or carboxyl-terminus). The term “N-terminus” relates to the start of a protein or polypeptide, terminated by an amino acid with a free amine group (—NH2). The term “C-terminus” relates to the end of an amino acid chain (protein or polypeptide), terminated by a free carboxyl group (—COOH).

[0114] The terms “nucleic acid” and “polynucleotide,” used interchangeably herein, include polymeric forms of nucleotides of any length, including ribonucleotides, deoxyribonucleotides, or analogs or modified versions thereof. They include single-, double-, and multi-stranded DNA or RNA, genomic DNA, cDNA, DNA-RNA hybrids, and polymers comprising purine bases, pyrimidine bases, or other natural, chemically modified, biochemically modified, non-natural, or derivatized nucleotide bases.

[0115] Nucleic acids are said to have “5′ ends” and “3′ ends” because mononucleotides are reacted to make oligonucleotides in a manner such that the 5′ phosphate of one mononucleotide pentose ring is attached to the 3′ oxygen of its neighbor in one direction via a phosphodiester linkage. An end of an oligonucleotide is referred to as the “5′ end” if its 5′ phosphate is not linked to the 3′ oxygen of a mononucleotide pentose ring. An end of an oligonucleotide is referred to as the “3′ end” if its 3′ oxygen is not linked to a 5′ phosphate of another mononucleotide pentose ring. A nucleic acid sequence, even if internal to a larger oligonucleotide, also may be said to have 5′ and 3′ ends. In either a linear or circular DNA molecule, discrete elements are referred to as being “upstream” or 5′ of the “downstream” or 3′ elements.

[0116] The term “genomically integrated” refers to a nucleic acid that has been introduced into a cell such that the nucleotide sequence integrates into the genome of the cell. Any protocol may be used for the stable incorporation of a nucleic acid into the genome of a cell.

[0117] The term “targeting vector” refers to a recombinant nucleic acid that can be introduced by homologous recombination, non-homologous-end-joining-mediated ligation, or any other means of recombination to a target position in the genome of a cell.

[0118] The term “viral vector” refers to a recombinant nucleic acid that includes at least one element of viral origin and includes elements sufficient for or permissive of packaging into a viral vector particle. The vector and/or particle can be utilized for the purpose of transferring DNA, RNA, or other nucleic acids into cells in vitro, ex vivo, or in vivo. Numerous forms of viral vectors are known.

[0119] The term “isolated” with respect to cells, tissues (e.g., liver samples), lipid droplets, proteins, and nucleic acids includes cells, tissues (e.g., liver samples), lipid droplets, proteins, and nucleic acids that are relatively purified with respect to other bacterial, viral, cellular, or other components that may normally be present in situ, up to and including a substantially pure preparation of the cells, tissues (e.g., liver samples), lipid droplets, proteins, and nucleic acids. The term “isolated” also includes cells, tissues (e.g., liver samples), lipid droplets, proteins, and nucleic acids that have no naturally occurring counterpart, have been chemically synthesized and are thus substantially uncontaminated by other cells, tissues (e.g., liver samples), lipid droplets, proteins, and nucleic acids, or has been separated or purified from most other components (e.g., cellular components or organism components) with which they are naturally accompanied (e.g., other cellular proteins, nucleic acids, or cellular or extracellular components).

[0120] The term “wild type” includes entities having a structure and/or activity as found in a normal (as contrasted with mutant, diseased, altered, or so forth) state or context. Wild type genes and polypeptides often exist in multiple different forms (e.g., alleles).

[0121] The term “endogenous sequence” refers to a nucleic acid sequence that occurs naturally within a rat cell or rat. For example, an endogenous Arsb sequence of a mouse refers to a native Arsb sequence that naturally occurs at the Arsb locus in the mouse.

[0122] “Exogenous” molecules or sequences include molecules or sequences that are not normally present in a cell in that form. Normal presence includes presence with respect to the particular developmental stage and environmental conditions of the cell. An exogenous molecule or sequence, for example, can include a mutated version of a corresponding endogenous sequence within the cell, such as a humanized version of the endogenous sequence, or can include a sequence corresponding to an endogenous sequence within the cell but in a different form (i.e., not within a chromosome). In contrast, endogenous molecules or sequences include molecules or sequences that are normally present in that form in a particular cell at a particular developmental stage under particular environmental conditions.

[0123] The term “heterologous” when used in the context of a nucleic acid or a protein indicates that the nucleic acid or protein comprises at least two segments that do not naturally occur together in the same molecule. For example, the term “heterologous,” when used with reference to segments of a nucleic acid or segments of a protein, indicates that the nucleic acid or protein comprises two or more sub-sequences that are not found in the same relationship to each other (e.g., joined together) in nature. As one example, a “heterologous” region of a nucleic acid vector is a segment of nucleic acid within or attached to another nucleic acid molecule that is not found in association with the other molecule in nature. For example, a heterologous region of a nucleic acid vector could include a coding sequence flanked by sequences not found in association with the coding sequence in nature. Likewise, a “heterologous” region of a protein is a segment of amino acids within or attached to another peptide molecule that is not found in association with the other peptide molecule in nature (e.g., a fusion protein, or a protein with a tag). Similarly, a nucleic acid or protein can comprise a heterologous label or a heterologous secretion or localization sequence.

[0124] “Codon optimization” takes advantage of the degeneracy of codons, as exhibited by the multiplicity of three-base pair codon combinations that specify an amino acid, and generally includes a process of modifying a nucleic acid sequence for enhanced expression in particular host cells by replacing at least one codon of the native sequence with a codon that is more frequently or most frequently used in the genes of the host cell while maintaining the native amino acid sequence. For example, a nucleic acid encoding an ARSB protein can be modified to substitute codons having a higher frequency of usage in a given prokaryotic or eukaryotic cell, including a bacterial cell, a yeast cell, a human cell, a non-human cell, a mammalian cell, a rodent cell, a mouse cell, a rat cell, a hamster cell, or any other host cell, as compared to the naturally occurring nucleic acid sequence. Codon usage tables are readily available, for example, at the “Codon Usage Database.” These tables can be adapted in a number of ways. See Nakamura et al. (2000) Nucleic Acids Res. 28(1):292, herein incorporated by reference in its entirety for all purposes. Computer algorithms for codon optimization of a particular sequence for expression in a particular host are also available (see, e.g., Gene Forge).

[0125] The term “locus” refers to a specific location of a gene (or significant sequence), DNA sequence, polypeptide-encoding sequence, or position on a chromosome of the genome of an organism. For example, an “Arsb locus” may refer to the specific location of an Arsb gene, Arsb DNA sequence, ARSB-encoding sequence, or Arsb position on a chromosome of the genome of an organism that has been identified as to where such a sequence resides. An “Arsb locus” may comprise a regulatory element of an Arsb gene, including, for example, an enhancer, a promoter, 5′ and/or 3′ untranslated region (UTR), or a combination thereof.

[0126] The term “gene” refers to DNA sequences in a chromosome that may contain, if naturally present, at least one coding and at least one non-coding region. The DNA sequence in a chromosome that codes for a product (e.g., but not limited to, an RNA product and/or a polypeptide product) can include the coding region interrupted with non-coding introns and sequence located adjacent to the coding region on both the 5′ and 3′ ends such that the gene corresponds to the full-length mRNA (including the 5′ and 3′ untranslated sequences). Additionally, other non-coding sequences including regulatory sequences (e.g., but not limited to, promoters, enhancers, and transcription factor binding sites), polyadenylation signals, internal ribosome entry sites, silencers, insulating sequence, and matrix attachment regions may be present in a gene. These sequences may be close to the coding region of the gene (e.g., but not limited to, within 10 kb) or at distant sites, and they influence the level or rate of transcription and translation of the gene.

[0127] The term “allele” refers to a variant form of a gene. Some genes have a variety of different forms, which are located at the same position, or genetic locus, on a chromosome. A diploid organism has two alleles at each genetic locus. Each pair of alleles represents the genotype of a specific genetic locus. Genotypes are described as homozygous if there are two identical alleles at a particular locus and as heterozygous if the two alleles differ.

[0128] A “promoter” is a regulatory region of DNA usually comprising a TATA box capable of directing RNA polymerase II to initiate RNA synthesis at the appropriate transcription initiation site for a particular polynucleotide sequence. In some cases, a promoter may additionally comprise other regions which influence the transcription initiation rate. The promoter sequences disclosed herein modulate transcription of an operably linked polynucleotide. A promoter can be active in one or more of the cell types disclosed herein (e.g., a mouse cell, a rat cell, a pluripotent cell, a one-cell stage embryo, a differentiated cell, or a combination thereof). A promoter can be, for example, a constitutively active promoter, a conditional promoter, an inducible promoter, a temporally restricted promoter (e.g., a developmentally regulated promoter), or a spatially restricted promoter (e.g., a cell-specific or tissue-specific promoter). Examples of promoters can be found, for example, in WO 2013/176772, herein incorporated by reference in its entirety for all purposes.

[0129] A constitutive promoter is one that is active in all tissues or particular tissues at all developing stages. Examples of constitutive promoters include the human cytomegalovirus immediate early (hCMV), mouse cytomegalovirus immediate early (mCMV), human elongation factor 1 alpha (hEF1α), mouse elongation factor 1 alpha (mEF1α), mouse phosphoglycerate kinase (PGK), chicken beta actin hybrid (CAG or CBh), SV40 early, and beta 2 tubulin promoters.

[0130] Examples of inducible promoters include, for example, chemically regulated promoters and physically-regulated promoters. Chemically regulated promoters include, for example, alcohol-regulated promoters (e.g., an alcohol dehydrogenase (alcA) gene promoter), tetracycline-regulated promoters (e.g., a tetracycline-responsive promoter, a tetracycline operator sequence (tetO), a tet-On promoter, or a tet-Off promoter), steroid regulated promoters (e.g., a rat glucocorticoid receptor, a promoter of an estrogen receptor, or a promoter of an ecdysone receptor), or metal-regulated promoters (e.g., a metalloprotein promoter). Physically regulated promoters include, for example temperature-regulated promoters (e.g., a heat shock promoter) and light-regulated promoters (e.g., a light-inducible promoter or a light-repressible promoter).

[0131] Tissue-specific promoters can be, for example, neuron-specific promoters, glia-specific promoters, muscle cell-specific promoters, heart cell-specific promoters, kidney cell-specific promoters, bone cell-specific promoters, endothelial cell-specific promoters, or immune cell-specific promoters (e.g., a B cell promoter or a T cell promoter).

[0132] Developmentally regulated promoters include, for example, promoters active only during an embryonic stage of development, or only in an adult cell.

[0133] “Operable linkage” or being “operably linked” includes juxtaposition of two or more components (e.g., a promoter and another sequence element) such that both components function normally and allow the possibility that at least one of the components can mediate a function that is exerted upon at least one of the other components. For example, a promoter can be operably linked to a coding sequence if the promoter controls the level of transcription of the coding sequence in response to the presence or absence of one or more transcriptional regulatory factors. Operable linkage can include such sequences being contiguous with each other or acting in trans (e.g., a regulatory sequence can act at a distance to control transcription of the coding sequence).

[0134] The methods and compositions provided herein employ a variety of different components. Some components throughout the description can have active variants and fragments. The term “functional” refers to the innate ability of a protein or nucleic acid (or a fragment or variant thereof) to exhibit a biological activity or function. The biological functions of functional fragments or variants may be the same or may in fact be changed (e.g., with respect to their specificity or selectivity or efficacy) in comparison to the original molecule, but with retention of the molecule's basic biological function.

[0135] The term “variant” refers to a nucleotide sequence differing from the sequence most prevalent in a population (e.g., by one nucleotide) or a protein sequence different from the sequence most prevalent in a population (e.g., by one amino acid).

[0136] The term “fragment,” when referring to a protein, means a protein that is shorter or has fewer amino acids than the full-length protein. The term “fragment,” when referring to a nucleic acid, means a nucleic acid that is shorter or has fewer nucleotides than the full-length nucleic acid. A protein fragment can be, for example, an N-terminal fragment (i.e., removal of a portion of the C-terminal end of the protein), a C-terminal fragment (i.e., removal of a portion of the N-terminal end of the protein), or an internal fragment (i.e., removal of a portion of each of the N-terminal and C-terminal ends of the protein). A nucleic acid fragment can be, for example, a 5′ fragment (i.e., removal of a portion of the 3′ end of the nucleic acid), a 3′ fragment (i.e., removal of a portion of the 5′ end of the nucleic acid), or an internal fragment (i.e., removal of a portion each of the 5′ and 3′ ends of the nucleic acid).

[0137] “Sequence identity” or “identity” in the context of two polynucleotides or polypeptide sequences refers to the residues in the two sequences that are the same when aligned for maximum correspondence over a specified comparison window. When percentage of sequence identity is used in reference to proteins, residue positions which are not identical often differ by conservative amino acid substitutions, where amino acid residues are substituted for other amino acid residues with similar chemical properties (e.g., charge or hydrophobicity) and therefore do not change the functional properties of the molecule. When sequences differ in conservative substitutions, the percent sequence identity may be adjusted upwards to correct for the conservative nature of the substitution. Sequences that differ by such conservative substitutions are said to have “sequence similarity” or “similarity.” Means for making this adjustment are well known. Typically, this involves scoring a conservative substitution as a partial rather than a full mismatch, thereby increasing the percentage sequence identity. Thus, for example, where an identical amino acid is given a score of 1 and a non-conservative substitution is given a score of zero, a conservative substitution is given a score between zero and 1. The scoring of conservative substitutions is calculated, e.g., as implemented in the program PC/GENE (Intelligenetics, Mountain View, California).

[0138] “Percentage of sequence identity” includes the value determined by comparing two optimally aligned sequences (greatest number of perfectly matched residues) over a comparison window, wherein the portion of the polynucleotide sequence in the comparison window may comprise additions or deletions (i.e., gaps) as compared to the reference sequence (which does not comprise additions or deletions) for optimal alignment of the two sequences. The percentage is calculated by determining the number of positions at which the identical nucleic acid base or amino acid residue occurs in both sequences to yield the number of matched positions, dividing the number of matched positions by the total number of positions in the window of comparison, and multiplying the result by 100 to yield the percentage of sequence identity. Unless otherwise specified (e.g., the shorter sequence includes a linked heterologous sequence), the comparison window is the full length of the shorter of the two sequences being compared.

[0139] Unless otherwise stated, sequence identity/similarity values include the value obtained using GAP Version 10 using the following parameters: % identity and % similarity for a nucleotide sequence using GAP Weight of 50 and Length Weight of 3, and the nwsgapdna.cmp scoring matrix; % identity and % similarity for an amino acid sequence using GAP Weight of 8 and Length Weight of 2, and the BLOSUM62 scoring matrix; or any equivalent program thereof. “Equivalent program” includes any sequence comparison program that, for any two sequences in question, generates an alignment having identical nucleotide or amino acid residue matches and an identical percent sequence identity when compared to the corresponding alignment generated by GAP Version 10.

[0140] The term “conservative amino acid substitution” refers to the substitution of an amino acid that is normally present in the sequence with a different amino acid of similar size, charge, or polarity. Examples of conservative substitutions include the substitution of a non-polar (hydrophobic) residue such as isoleucine, valine, or leucine for another non-polar residue. Likewise, examples of conservative substitutions include the substitution of one polar (hydrophilic) residue for another such as between arginine and lysine, between glutamine and asparagine, or between glycine and serine. Additionally, the substitution of a basic residue such as lysine, arginine, or histidine for another, or the substitution of one acidic residue such as aspartic acid or glutamic acid for another acidic residue are additional examples of conservative substitutions. Examples of non-conservative substitutions include the substitution of a non-polar (hydrophobic) amino acid residue such as isoleucine, valine, leucine, alanine, or methionine for a polar (hydrophilic) residue such as cysteine, glutamine, glutamic acid or lysine and/or a polar residue for a non-polar residue. Typical amino acid categorizations are summarized below.

TABLE 1
Amino Acid Categorizations.

| | | | | | |
|---|---|---|---|---|---|
| Alanine | Ala | A | Nonpolar | Neutral | 1.8 |
| Arginine | Arg | R | Polar | Positive | −4.5 |
| Asparagine | Asn | N | Polar | Neutral | −3.5 |
| Aspartic acid | Asp | D | Polar | Negative | −3.5 |
| Cysteine | Cys | C | Nonpolar | Neutral | 2.5 |
| Glutamic acid | Glu | E | Polar | Negative | −3.5 |
| Glutamine | Gln | Q | Polar | Neutral | −3.5 |
| Glycine | Gly | G | Nonpolar | Neutral | −0.4 |
| Histidine | His | H | Polar | Positive | −3.2 |
| Isoleucine | Ile | I | Nonpolar | Neutral | 4.5 |
| Leucine | Leu | L | Nonpolar | Neutral | 3.8 |
| Lysine | Lys | K | Polar | Positive | −3.9 |
| Methionine | Met | M | Nonpolar | Neutral | 1.9 |
| Phenylalanine | Phe | F | Nonpolar | Neutral | 2.8 |
| Proline | Pro | P | Nonpolar | Neutral | −1.6 |
| Serine | Ser | S | Polar | Neutral | −0.8 |
| Threonine | Thr | T | Polar | Neutral | −0.7 |
| Tryptophan | Trp | W | Nonpolar | Neutral | −0.9 |
| Tyrosine | Tyr | Y | Polar | Neutral | −1.3 |
| Valine | Val | V | Nonpolar | Neutral | 4.2 |

[0141] A “homologous” sequence (e.g., nucleic acid sequence) includes a sequence that is either identical or substantially similar to a known reference sequence, such that it is, for example, at least 50%, at least 55%, at least 60%, at least 65%, at least 70%, at least 75%, at least 80%, at least 85%, at least 90%, at least 95%, at least 96%, at least 97%, at least 98%, at least 99%, or 100% identical to the known reference sequence. Homologous sequences can include, for example, orthologous sequence and paralogous sequences. Homologous genes, for example, typically descend from a common ancestral DNA sequence, either through a speciation event (orthologous genes) or a genetic duplication event (paralogous genes). “Orthologous” genes include genes in different species that evolved from a common ancestral gene by speciation. Orthologs typically retain the same function in the course of evolution. “Paralogous” genes include genes related by duplication within a genome. Paralogs can evolve new functions in the course of evolution.

[0142] The term “in vitro” includes artificial environments and to processes or reactions that occur within an artificial environment (e.g., a test tube or an isolated cell or cell line). The term “in vivo” includes natural environments (e.g., an organism or body or a cell or tissue within an organism or body) and to processes or reactions that occur within a natural environment. The term “ex vivo” includes cells that have been removed from the body of an individual and processes or reactions that occur within such cells.

[0143] The term “reporter gene” refers to a nucleic acid having a sequence encoding a gene product (typically an enzyme) that is easily and quantifiably assayed when a construct comprising the reporter gene sequence operably linked to a heterologous promoter and/or enhancer element is introduced into cells containing (or which can be made to contain) the factors necessary for the activation of the promoter and/or enhancer elements. Examples of reporter genes include, but are not limited, to genes encoding beta-galactosidase (lacZ), the bacterial chloramphenicol acetyltransferase (cat) genes, firefly luciferase genes, genes encoding beta-glucuronidase (GUS), and genes encoding fluorescent proteins. A “reporter protein” refers to a protein encoded by a reporter gene.

[0144] The term “fluorescent reporter protein” as used herein means a reporter protein that is detectable based on fluorescence wherein the fluorescence may be either from the reporter protein directly, activity of the reporter protein on a fluorogenic substrate, or a protein with affinity for binding to a fluorescent tagged compound. Examples of fluorescent proteins include green fluorescent proteins (e.g., GFP, GFP-2, tagGFP, turboGFP, eGFP, Emerald, Azami Green, Monomeric Azami Green, CopGFP, AceGFP, and ZsGreen1), yellow fluorescent proteins (e.g., YFP, eYFP, Citrine, Venus, YPet, PhiYFP, and ZsYellow1), blue fluorescent proteins (e.g., BFP, eBFP, eBFP2, Azurite, mKalama1, GFPuv, Sapphire, and T-sapphire), cyan fluorescent proteins (e.g., CFP, eCFP, Cerulean, CyPet, AmCyan1, and Midoriishi-Cyan), red fluorescent proteins (e.g., RFP, mKate, mKate2, mPlum, DsRed monomer, mCherry, mRFP1, DsRed-Express, DsRed2, DsRed-Monomer, HcRed-Tandem, HcRed1, AsRed2, eqFP611, mRaspberry, mStrawberry, and Jred), orange fluorescent proteins (e.g., mOrange, mKO, Kusabira-Orange, Monomeric Kusabira-Orange, mTangerine, and tdTomato), and any other suitable fluorescent protein whose presence in cells can be detected by flow cytometry methods.

[0145] Repair in response to double-strand breaks (DSBs) occurs principally through two conserved DNA repair pathways: homologous recombination (HR) and non-homologous end joining (NHEJ). See Kasparek & Humphrey (2011) Semin. Cell Dev. Biol. 22(8):886-897, herein incorporated by reference in its entirety for all purposes. Likewise, repair of a target nucleic acid mediated by an exogenous donor nucleic acid can include any process of exchange of genetic information between the two polynucleotides.

[0146] The term “recombination” includes any process of exchange of genetic information between two polynucleotides and can occur by any mechanism. Recombination can occur via homology directed repair (HDR) or homologous recombination (HR). HDR or HR includes a form of nucleic acid repair that can require nucleotide sequence homology, uses a “donor” molecule as a template for repair of a “target” molecule (i.e., the one that experienced the double-strand break), and leads to transfer of genetic information from the donor to target. Without wishing to be bound by any particular theory, such transfer can involve mismatch correction of heteroduplex DNA that forms between the broken target and the donor, and/or synthesis-dependent strand annealing, in which the donor is used to resynthesize genetic information that will become part of the target, and/or related processes. In some cases, the donor polynucleotide, a portion of the donor polynucleotide, a copy of the donor polynucleotide, or a portion of a copy of the donor polynucleotide integrates into the target DNA. See Wang et al. (2013) Cell 153:910-918; Mandalos et al. (2012) PLoS ONE 7:e45768:1-9; and Wang et al. (2013) Nat. Biotechnol. 31:530-532, each of which is herein incorporated by reference in its entirety for all purposes.

[0147] Non-homologous end joining (NHEJ) includes the repair of double-strand breaks in a nucleic acid by direct ligation of the break ends to one another or to an exogenous sequence without the need for a homologous template. Ligation of non-contiguous sequences by NHEJ can often result in deletions, insertions, or translocations near the site of the double-strand break. For example, NHEJ can also result in the targeted integration of an exogenous donor nucleic acid through direct ligation of the break ends with the ends of the exogenous donor nucleic acid (i.e., NHEJ-based capture). Such NHEJ-mediated targeted integration can be preferred for insertion of an exogenous donor nucleic acid when homology directed repair (HDR) pathways are not readily usable (e.g., in non-dividing cells, primary cells, and cells which perform homology-based DNA repair poorly). In addition, in contrast to homology-directed repair, knowledge concerning large regions of sequence identity flanking the cleavage site is not needed, which can be beneficial when attempting targeted insertion into organisms that have genomes for which there is limited knowledge of the genomic sequence. The integration can proceed via ligation of blunt ends between the exogenous donor nucleic acid and the cleaved genomic sequence, or via ligation of sticky ends (i.e., having 5′ or 3′ overhangs) using an exogenous donor nucleic acid that is flanked by overhangs that are compatible with those generated by a nuclease agent in the cleaved genomic sequence. See, e.g., US 2011/020722, WO 2014/033644, WO 2014/089290, and Maresca et al. (2013) Genome Res. 23(3):539-546, each of which is herein incorporated by reference in its entirety for all purposes. If blunt ends are ligated, target and/or donor resection may be needed to generation regions of microhomology needed for fragment joining, which may create unwanted alterations in the target sequence.

[0148] Compositions or methods “comprising” or “including” one or more recited elements may include other elements not specifically recited. For example, a composition that “comprises” or “includes” a protein may contain the protein alone or in combination with other ingredients. The transitional phrase “consisting essentially of” means that the scope of a claim is to be interpreted to encompass the specified elements recited in the claim and those that do not materially affect the basic and novel characteristic(s) of the claimed invention. Thus, the term “consisting essentially of” when used in a claim of this invention is not intended to be interpreted to be equivalent to “comprising.”

[0149] “Optional” or “optionally” means that the subsequently described event or circumstance may or may not occur and that the description includes instances in which the event or circumstance occurs and instances in which the event or circumstance does not.

[0150] Designation of a range of values includes all integers within or defining the range, and all subranges defined by integers within the range.

[0151] Unless otherwise apparent from the context, the term “about” encompasses values±5 of a stated value.

[0152] The term “and/or” refers to and encompasses any and all possible combinations of one or more of the associated listed items, as well as the lack of combinations when interpreted in the alternative (“or”).

[0153] The term “or” refers to any one member of a particular list.

[0154] The singular forms of the articles “a,” “an,” and “the” include plural references unless the context clearly dictates otherwise. For example, the term “a protein” or “at least one protein” can include a plurality of proteins, including mixtures thereof.

[0155] Statistically significant means p≤0.05.

### DETAILED DESCRIPTION

### I. Overview

[0156] Disclosed herein are non-human animal genomes, non-human animal cells, and non-human animals comprising a reverse-conditional null endogenous lysosomal storage disease gene and methods of making and using such non-human animal cells and non-human animals. Also disclosed herein are methods of using the non-human animals for assessing reversibility of a phenotype of the lysosomal storage disease or for determining an optimal timeframe for treatment of a phenotype of the lysosomal storage disease. Also disclosed herein are non-human animal reverse-conditional null endogenous lysosomal storage disease genes and nuclease agents and targeting vectors for use in making a non-human animal reverse-conditional null endogenous lysosomal storage disease gene.

[0157] Mucopolysaccharidoses (MPS) are a subset of lysosomal diseases that are caused by a recessive deficiency in enzymes required for the degradation of glycosaminoglycans (GAGs). GAGs are functionally diverse, but play critical roles in tissue maturation, extracellular matrix (ECM) formation and function, and the development of the skeleton. Seven types of MPS are characterized, and across types there exists significant overlap in clinical phenotypes associated with disease. Nearly all MPS subtypes include a spectrum of dysostosis multiplex, or progressive skeletal dysplasia. Mucopolysaccharidosis VI (MPS VI), also known as Maroteaux-Lamy Syndrome, is a lysosomal disease resulting from impaired function of the arylsulfatase B (ARSB) protein. This impairment causes aberrant accumulation of dermatan sulfate, a glycosaminoglycan (GAG) abundant in growth plates, cartilage, and extracellular matrix. While clinical presentation is variable in terms of age at first symptom manifestation and disease severity, MPS VI classically presents at early ages and significantly impacts the skeleton. Current treatment guidelines recommend enzyme replacement therapy (ERT), which is known to provide incomplete or ineffective recovery from the skeletal manifestations of disease. We can postulate this may be due to the inability of the exogenous enzyme to reach affected cells, or that disease may not be reversible at the time therapy is delivered. To date, no models of disease exist that separate treatment efficacy from disease reversibility. Similar issues exist with models for other mucopolysaccharidosis diseases (e.g., MPS I) and other lysosomal storage diseases. The existing models do not resolve reversibility or treatment efficiency questions, as they look at delivery of a therapeutic at a single (or very few) timepoints, and are restricted by limitations on uptake of the therapeutic. To date, no model exists where efficacy of ERT and reversibility of the phenotype can be explored independently.

[0158] In order to separate reversibility of phenotype from questions about recombinant enzyme delivery, we have developed novel models employing a conditional inversion method. To this end, we have developed lysosomal storage disease mouse models comprising a reverse-conditional null endogenous lysosomal storage disease gene that can turn back on endogenous expression of the missing lysosomal storage disease gene enzyme at different points during disease progression to properly assess reversibility of disease phenotypes separate from efficacy of a particular treatment. In other words, the models described herein can inform us regarding the maximal possible correction we can expect to achieve for phenotypes associated with lysosomal storage diseases if we can develop an optimized therapeutic. In one specific example, exon 5 of the murine Arsb gene is inverted, preventing any functional expression of ARSB. It is also flanked by lox sites (lox66 and lox71 sites), which allow for the exon to be flipped back to the native orientation in the presence of Cre recombinase. In another specific example, a region from intron 3 through the 3′ UTR of the Idua gene was inverted in the mouse Idua locus, preventing any functional expression of IDUA. It is also flanked by lox sites (lox66 and lox71 sites), which allow for the region to be flipped back to the native orientation in the presence of Cre recombinase. Unlike classic floxed-stop conditional-on allele approaches, where wild type might result from readthrough past the floxed-stop cassette and RNA splicing, in this COIN-based approach no functional message can be made. Introduction of a controllable Cre recombinase (e.g., Cre-ER^{T2}) allows for restoration of the wild-type orientation of the exon at specific timepoints. Therefore, we can restore native ARSB expression or IDUA expression from the endogenous locus at various developmental timepoints, allowing for reinstitution of protein in the correct cells and at natural levels.

### II. Non-Human Animals Comprising a Reverse-Conditional Null Endogenous Lysosomal Storage Disease Gene

[0159] The non-human animal genomes, non-human animal cells, and non-human animals described herein comprise a reverse-conditional null endogenous lysosomal storage disease gene.

### A. Lysosomal Storage Disease Genes

[0160] The non-human animal genomes, non-human animal cells, and non-human animals described herein comprise a reverse-conditional null endogenous lysosomal storage disease gene (e.g., a reverse-conditional null endogenous mouse lysosomal storage disease gene or a reverse-conditional null endogenous rat lysosomal storage disease gene). An endogenous lysosomal storage disease gene means a lysosomal storage disease gene at the endogenous genomic locus for that lysosomal storage disease gene. In some cases, an endogenous lysosomal storage disease gene in a non-human animal can be an endogenous non-human animal lysosomal storage disease gene, meaning that it has not been humanized (i.e., a fully non-human animal lysosomal storage disease gene). For example, an endogenous lysosomal storage disease gene in a mouse can be an endogenous mouse lysosomal storage disease gene at the endogenous mouse locus for that lysosomal storage disease gene (i.e., a fully mouse lysosomal storage disease gene). In other cases, an endogenous lysosomal storage gene at the endogenous locus can be humanized (e.g., a segment of the endogenous lysosomal storage disease gene locus has been deleted and replaced with a corresponding human lysosomal storage gene sequence). A lysosomal storage disease gene is a gene that encodes a protein that is deficient in a lysosomal storage disease. Lysosomal storage diseases are a group of over 70 rare inherited metabolic disorders that result from defects in lysosomal function. Lysosomal storage diseases are caused by lysosomal dysfunction, usually as a consequence of deficiency of a single enzyme required for the metabolism of lipids, glycoproteins, or mucopolysaccharides. Most of lysosomal storage diseases are autosomal recessively inherited (e.g., Niemann-Pick disease, type C), but a few are X-linked recessively inherited (e.g., Fabry disease and Hunter syndrome (MPS II)). The pathogeneses of the diseases are ascribed to the buildup of incomplete degradation products in the lysosome, usually due to loss of protein function. Lysosomal storage diseases are caused by loss-of-function or attenuating variants in the proteins whose normal function is to degrade or coordinate degradation of lysosomal contents. The proteins affiliated with lysosomal storage diseases include enzymes, receptors and other transmembrane proteins (e.g., NPC1), post-translational modifying proteins (e.g., sulfatase), membrane transport proteins, and non-enzymatic cofactors and other soluble proteins (e.g., GM2 ganglioside activator).

[0161] Lysosomal storage diseases are a class of rare diseases that affect the degradation of myriad substrates in the lysosome. Those substrates include sphingolipids, mucopolysaccharides, glycoproteins, glycogen, and oligosaccharides, which can accumulate in the cells of those with disease leading to cell death. Organs affected by lysosomal storage diseases include the central nervous system (CNS), the peripheral nervous system (PNS), lungs, liver, bone, skeletal and cardiac muscle, and the reticuloendothelial system.

[0162] Lysosomal storage diseases include sphingolipidoses, a mucopolysaccharidoses, and glycogen storage diseases. In some embodiments, the lysosomal storage disease is any one of Fabry disease, Gaucher disease type I, Gaucher disease type II, Gaucher disease type III, Niemann-Pick disease type A, Niemann-Pick disease type BGM1-gangliosidosis, Sandhoff disease, Tay-Sachs disease, GM2-activator deficiency, GM3-gangliosidosis, metachromatic leukodystrophy, sphingolipid-activator deficiency, Scheie disease, Hurler-Scheie disease, Hurler disease, Hunter disease, Sanfilippo A, Sanfilippo B, Sanfilippo C, Sanfilippo D, Morquio syndrome A, Morquio syndrome B, Maroteaux-Lamy disease, Sly disease, MPS IX, and Pompe disease. Enzymes (which include proteins that are not per se catalytic) associated with lysosomal storage diseases include for example any and all hydrolases, α-galactosidase, β-galactosidase, α-glucosidase, β-glucosidase, saposin-C activator, ceramidase, sphingomyelinase, β-hexosaminidase, GM2 activator, GM3 synthase, arylsulfatase, sphingolipid activator, α-iduronidase, iduronidase-2-sulfatase, heparin N-sulfatase, N-acetyl-α-glucosaminidase, α-glucosamide N-acetyltransferase, N-acetylglucosamine-6-sulfatase, N-acetylgalactosamine-6-sulfate sulfatase, N-acetylgalactosamine-4-sulfatase, β-glucuronidase, hyaluronidase, and the like.

[0163] The nature of the molecular lesion affects the severity of the disease in many cases. Complete loss-of-function tends to be associated with prenatal or neonatal onset, and involves severe symptoms; partial loss-of-function is associated with milder (relatively) and later-onset disease. Generally, only a small percentage of activity needs to be restored to have to correct metabolic defects in deficient cells. Table 2 lists some of the more common lysosomal storage diseases and their associated loss-of-function proteins.

TABLE 2
Lysosomal Storage Diseases.

| Class | Disease | Involved Enzyme/Protein |
|---|---|---|
| Sphingolipidoses | Fabry disease | α-Galactosidase A |
| | Farber lipogranulomatosis | Ceramidase |
| | Gaucher disease type I | β-Glucosidase |
| | Gaucher disease types II and III | Saposin-C activator |
| | Niemann-Pick diseases types A and B | Sphingomyelinase |
| | GM1-gangliosidosis | β-Galactosidase |
| | GM2-gangliosidosis (Sandhoff) | β-Hexosaminidase A and B |
| | GM2-gangliosidosis (Tay-Sachs) | β-Hexosaminidase A |
| | GM2-gangliosidosis (GM2-activator | GM2-activator protein |
| | deficiency) | |
| | GM3-gangliosidosis | GM3 synthase |
| | Metachromatic leukodystrophy | Arylsulfatase A |
| | Sphingolipid-activator deficiency | Sphingolipid activator |
| Mucopoly- | MPS I (Scheie, Hurler-Scheie, | α-Iduronidase |
| saccharidoses | and Hurler disease) | |
| | MPS II (Hunter) | Iduronidase-2-sulphatase |
| | MPS IIIA (Sanfilippo A) | Heparan N-sulphatase |
| | MPS IIIB (Sanfilippo B) | N-acetyl-α-glucosaminidase |
| | MPS IIIC (Sanfilippo C) | Acetyl-CoA; α-glucosamide |
| | | N-acetyltransferase |
| | MPS IIID (Sanfilippo D) | N-acetylglucosamine-6- sulphatase |
| | MPS IVA (Morquio syndrome A) | N-acetylgalactosamine-6- sulphate |
| | | sulphatase |
| | MPS IVB (Morquio syndrome B) | β-Galactosidase |
| | MPS VI (Maroteaux-Lamy) | N-acetylgalactosamine-4- |
| | | sulphatase (arylsulphatase B) |
| | MPS VII (Sly disease) | β-Glucuronidase |
| | MPS IX | Hylauronidase |
| Glycogen | Pompe (glycogen storage | α-Glucosidase 2 |
| storage disease | disease type II) | |
| Lipid metabolism | Lysosomal acid lipase deficiency | Lysosomal acid lipase |
| | (LAL-D; Wolman disease) | |

[0164] Lysosomal storage diseases can be categorized according to the type of product that accumulates within the defective lysosome. Sphingolipidoses are a class of diseases that affect the metabolism of sphingolipids, which are lipids containing fatty acids linked to aliphatic amino alcohols. The accumulated products of sphingolipidoses include gangliosides (e.g., Tay-Sachs disease), glycolipids (e.g., Fabry's disease), and glucocerebrosides (e.g., Gaucher's disease).

[0165] Mucopolysaccharidoses are a group of diseases that affect the metabolism of glycosaminoglycans (GAGS or mucopolysaccharides), which are long unbranched chains of repeating disaccharides that help build bone, cartilage, tendons, corneas, skin and connective tissue. The accumulated products of mucopolysaccharidoses include heparan sulfate, dermatan sulfate, keratin sulfate, various forms of chondroitin sulfate, and hyaluronic acid. For example, Morquio syndrome A is due to a defect in the lysosomal enzyme galactose-6-sulfate sulfatase, which results in the lysosomal accumulation of keratin sulfate and chondroitin 6-sulfate.

[0166] Glycogen storage diseases result from a cell's inability to metabolize (make or break-down) glycogen. Glycogen metabolism is moderated by various enzymes or other proteins including glucose-6-phosphatase, acid alpha-glucosidase, glycogen de-branching enzyme, glycogen branching enzyme, muscle glycogen phosphorylase, liver glycogen phosphorylase, muscle phosphofructokinase, phosphorylase kinase, glucose transporter, aldolase A, beta-enolase, and glycogen synthase. An exemplar lysosomal storage/glycogen storage disease is Pompe disease, in which defective acid alpha-glucosidase causes glycogen to accumulate in lysosomes. Symptoms include hepatomegaly, muscle weakness, heart failure, and in the case of the infantile variant, death by age two.

[0167] In a particular example, a lysosomal storage disease gene can be a mucopolysaccharidosis gene. A mucopolysaccharidosis is a gene that encodes a protein that is deficient in a mucopolysaccharidosis (MPS). In one specific example, the MPS is MPS VI, and the gene is Arsb. In another specific example, the MPS is MPS I, and the gene is Idua.

[0168] Mucopolysaccharidoses are a group of metabolic disorders caused by the absence or malfunctioning of lysosomal enzymes needed to break down molecules called glycosaminoglycans (GAGs). These long chains of sugar carbohydrates occur within the cells that help build bone, cartilage, tendons, corneas, skin and connective tissue. GAGs (formerly called mucopolysaccharides) are also found in the fluids that lubricate joints.

[0169] Individuals with mucopolysaccharidosis either do not produce enough of one of the eleven enzymes required to break down these sugar chains into simpler molecules, or they produce enzymes that do not work properly. Over time, these GAGs collect in the cells, blood and connective tissues. The result is permanent, progressive cellular damage which affects appearance, physical abilities, organ and system functioning.

[0170] The mucopolysaccharidoses share many clinical features but have varying degrees of severity. These features may not be apparent at birth but progress as storage of GAGs affects bone, skeletal structure, connective tissues, and organs. Neurological complications may include damage to neurons (which send and receive signals throughout the body) as well as pain and impaired motor function. This results from compression of nerves or nerve roots in the spinal cord or in the peripheral nervous system, the part of the nervous system that connects the brain and spinal cord to sensory organs such as the eyes and to other organs, muscles, and tissues throughout the body.

[0171] Individuals with MPS disorders share many similar symptoms such as multiple organ involvement, distinctive coarse facial features, and abnormalities of the skeleton especially joint problems. Additional findings include short stature, heart abnormalities, breathing irregularities, liver and spleen enlargement (hepatosplenomegaly), and/or neurological abnormalities. The severity of the different MPS disorders varies greatly among affected individuals, even among those with the same type of MPS and even among individuals of the same family. Different mucopolysaccharidoses are set forth in Table 3.

TABLE 3
Mucopolysaccharidoses.

| MPS | Common name; | | | Accumulated | |
|---|---|---|---|---|---|
| Type | Other names | Gene | Deficient enzyme | products | Symptoms |
| MPS | Hurler syndrome | IDUA | α-L-iduronidase | Heparan | Intellectual |
| IH | | | | sulfate; | disability, |
| MPS | Hurler-Scheie syndrome | | | Dermatan | micrognathia, coarse |
| IH/S | | | | sulfate | facial features, |
| MPS | Scheie syndrome; Formerly: | | | | macroglossia, retinal |
| IS | Mucopolysaccharidosis type | | | | degeneration, |
| | V | | | | corneal clouding, |
| | | | | | cardiomyopathy, |
| | | | | | hepatosplenomegaly |
| MPS | Hunter syndrome | IDS | Iduronate sulfatase | Heparan | Intellectual |
| II | | | | sulfate; | disability (similar, |
| | | | | Dermatan | but milder, symptoms |
| | | | | sulfate | to MPS I). This type |
| | | | | | exceptionally has X- |
| | | | | | linked recessive |
| | | | | | inheritance |
| MPS | Sanfilippo syndrome A; | SGSH | Heparan sulfamidase | Heparan | Developmental delay, |
| IIIA | Sulfamidase deficiency | | | sulfate | severe hyperactivity, |
| MPS | Sanfilippo syndrome B; | NAGLU | N- | | spasticity, motor |
| IIIB | NAGLU deficiency | | acetylglucosaminidase | | dysfunction, death |
| MPS | Sanfilippo syndrome C | HGSNAT | Heparan-α- | | by the second decade |
| IIIC | | | glucosaminide N- | | |
| | | | acetyltransferase | | |
| MPS | Sanfilippo syndrome D | GNS | N-acetylglucosamine | | |
| IIID | | | 6-sulfatase | | |
| MPS | Morquio syndrome A | GALNS | Galactose-6-sulfate | Keratan | Severe skeletal |
| IVA | | | sulfatase | sulfate; | dysplasia, short |
| | | | | Chondroitin | stature, motor |
| | | | | 6-sulfate | dysfunction |
| MPS | Morquio syndrome B | GLB1 | β-galactosidase | Keratan | |
| IVB | | | | sulfate | |
| MPS | Maroteaux-Lamy syndrome; | ARSB | N- | Dermatan | Severe skeletal |
| VI | ARSB deficiency | | acetylgalactosamine- | sulfate | dysplasia, short |
| | | | 4-sulfatase | | stature, motor |
| | | | | | dysfunction, |
| | | | | | kyphosis, heart |
| | | | | | defects |
| MPS | Sly syndrome; GUSB | GUSB | β-glucuronidase | Heparan | Hepatomegaly, |
| VII | deficiency | | | sulfate; | skeletal dysplasia, |
| | | | | Dermatan | short stature, corneal |
| | | | | sulfate; | clouding, |
| | | | | Chondroitin | developmental delay |
| | | | | 4,6-sulfate | |
| MPS | Natowicz syndrome; | HYAL1 | Hyaluronidase | Hyaluronic | Nodular soft-tissue |
| IX | Hyaluronidase deficiency | | | acid | masses around joints, |
| | | | | | episodes of painful |
| | | | | | swelling of the masses, |
| | | | | | short-term pain, mild |
| | | | | | facial changes, short |
| | | | | | stature, normal joint |
| | | | | | movement, normal |
| | | | | | intelligence |

[0172] In a specific example, the MPS is MPS VI. Maroteaux-Lamy syndrome (mucopolysaccharidosis type VI; MPS VI) is characterized by a deficiency of the enzyme N-acetylgalactosamine-4-sulfatase, resulting in accumulation of dermatan sulfate. This form of MPS varies greatly among affected individuals. Some affected individuals only experience a few mild symptoms, other develop a more severe form of the disorder. Possible symptoms of Maroteaux-Lamy syndrome include coarse facial features, umbilical hernia, a prominent breastbone (pectus carinatum), joint contractures, clouding of the corneas, and an abnormal enlargement of the liver and/or spleen (heptasplenomegaly). Skeletal malformations and heart disease may occur in individuals with this form of MPS. In most cases, intelligence is normal. In 2005, the U.S. Food and Drug Administration (FDA) approved galsulfase (Naglazyme) for the treatment of MPS VI, also known as Maroteaux-Lamy syndrome. Characterization of MPS VI patients and their symptoms has been more extensive in recent years. There are over 200 documented mutations of the ARSB gene, along with burgeoning evidence that genotype-phenotype correlations can be clinically useful. Nonsense mutations, indels, and early frameshifts have been shown to correlate with rapidly progressing and/or severe forms of disease. However, extensive clinical characterization of individual mutations, especially missense mutations, are problematic as most are novel and rare. Across mutation types, symptoms include a spectrum of heart abnormalities, corneal clouding, organomegaly, craniofacial deformities, scoliosis or kyphosis, and shortened stature. Enzyme replacement therapy (ERT) using recombinant human ARSB, galsulfase, has been approved and available for non-curative treatment of MPS VI since 2005. Recommendations include a weekly, four hour intravenous administration with antihistamine and/or antipyretic cocktail prior to each transfusion to control for infusion adverse reactions. In the clinic, ERT quickly and effectively reduces urinary GAG and hepatosplenomegaly. It is known, however, that there is limited efficacy for the spectrum of skeletal disease, with a sporadically reported, modest improvement in shoulder flexion.

[0173] In a specific example, the MPS is MPS I. Hurler syndrome (mucopolysaccharidosis type 1-H; MPS 1-H) is the most severe form of mucopolysaccharidosis. It is characterized by a deficiency of the enzyme alpha-L-iduronidase, which results in an accumulation of dermatan and heparan sulfates. Symptoms of the disorder first become evident at six months to two years of age. Affected infants may experience developmental delays, recurrent urinary and upper respiratory tract infections, noisy breathing and persistent nasal discharge. Additional physical problems may include clouding of the cornea of the eye, an unusually large tongue, severe deformity of the spine, and joint stiffness. Mental development begins to regress at about the age of two. Scheie syndrome (mucopolysaccharidosis type I-S; MPS 1-S) is the mildest form of mucopolysaccharidosis. As in Hurler syndrome, individuals with Scheie syndrome have a deficiency of the enzyme alpha-L-iduronidase. However, in Scheie syndrome the deficiency is specific for accumulation of dermatan sulfate. Individuals with Scheie syndrome have normal intelligence, height, and life expectancy. Symptoms include stiff joints, carpal tunnel syndrome, backward flow of blood into the heart (aortic regurgitation), and clouding of the cornea that may result in the loss of visual acuity. The onset of symptoms in individuals with Scheie syndrome usually occurs around the age of five. Hurler-Scheie syndrome (mucopolysaccharidosis type I-H/S; MPS-IH/S) is an extremely rare disorder that refers to individuals who have a less severe form of Hurler syndrome, but a more severe form than Scheie syndrome. Like Scheie syndrome, affected individuals have a deficiency of the alpha-L-iduronidase specific for accumulation of dermatan sulfate. Hurler-Scheie syndrome is not as severe as Hurler syndrome, but more severe than Scheie syndrome. Affected individuals may develop coarse facial features, joint stiffness, short stature, clouding of the corneas, abnormally enlarged liver and/spleen (hepatosplenomegaly), and skeletal and cardiac abnormalities. Intelligence may be normal or mild to moderate intellectual disability may develop. Symptoms usually become apparent between three and six years of age. In 2003, The FDA approved laronidase (Aldurazyme) as a treatment for MPS I. Specifically, this enzyme replacement therapy is approved for treating patients with the Hurler and Hurler-Scheie forms of MPS I and those with the Scheie form who exhibit moderate to severe symptoms. Clinical trials using laronidase show limited improvement on skeletal phenotypes and little to no improvement on cognitive phenotypes in MPS I. See, e.g., Dornelles et al. (2017) PLoS One 12(8):e0184065 and Chen et al. (2020) Mol. Genet. Metab. 129(2):80-90, each of which is herein incorporated by reference in its entirety for all purposes.

[0174] In a specific example, the lysosomal storage disease gene is an Arsb gene. Arsb (also known as Asl or Asl-s) encodes arylsulfatase B (also known as ARSB, ASB, N-acetylgalactosamine-4-sulfatase, or G4S). ARSB is a lysosomal enzyme required for the catalysis of the sulfate moiety on the terminal ring at the non-reducing end of the GAG, dermatan sulfate (DS), also known as chondroitin sulfate B. In addition to key roles in maintaining ECM stability by direct interaction with structural proteins like collagen and fibronectin, DS serves as a binding factor for adhesins and defensins expressed by specific pathogens, and plays a role in chemokine and cytokine binding. In some instances, this may be accomplished by the establishment of a solubility gradient as GAG structures coordinate water extremely well, and can have an indirect effect on ligand-receptor binding. In the context of the skeletal phenotype exhibited by MPS VI patients, DS-specific roles in cartilage and bone development may play a role in disease progression. It is known that multiple proteoglycans, such as decorin, epiphycans, and biglycans, are directly modified by or are composed of DS structures, and that such modifications have been known to effect growth factor signaling integral for cell proliferation and differentiation. In addition, loss of or impaired function of enzymes in mucopolysaccharidoses primarily cause accumulation of substrates in lysosomes, with downstream effects linked to lysosomal dysfunction, such as impaired vesicular trafficking, autophagy, and ion homeostasis which likely contribute to clinical manifestations. Pathogenic Arsb gene variants cause MPS VI. ARSB is involved in the breakdown of large sugar molecules called glycosaminoglycans (GAGs). Mutations in the Arsb gene reduce or completely eliminate the function of ARSB. The lack of ARSB activity leads to the accumulation of GAGs within cells, specifically inside the lysosomes.

[0175] Mouse Arsb maps to 13 C3; 13 47.88 cM on chromosome 13 (NCBI RefSeq Gene ID 11881; Assembly GRCm39 (GCF_000001635.27); location NC_000079.7 (93908187 . . . 94079524)). The gene has been reported to have 8 exons. The mouse ARSB protein has been assigned UniProt Accession No. P50429. The sequence for the mouse ARSB protein (NCBI Accession No. NP_033842.3) is set forth in SEQ ID NO: 1. An mRNA (cDNA) encoding the canonical isoform is assigned NCBI Accession No. NM_009712.3 and is set forth in SEQ ID NO: 2. An exemplary coding sequence (CDS) for the canonical isoform is set forth in SEQ ID NO: 3 (CCDS ID CCDS36749.1). The full-length mouse ARSB protein set forth in SEQ ID NO: 1 has 534 amino acids, including a signal peptide (amino acids 1-39) and an intracellular domain (amino acids 40-534). Delineations between these domains are as designated in UniProt. Reference to mouse ARSB includes the canonical isoform set forth in SEQ ID NO: 1 as well as all allelic forms and isoforms. Any other forms of mouse ARSB have amino acids numbered for maximal alignment with the canonical isoform, aligned amino acids being designated the same number. Rat ARSB protein has been assigned UniProt Accession No. P50430 and NCBI GeneID 25227. Human ARSB protein has been assigned UniProt Accession No. P15848 and NCBI GeneID 411.

[0176] In another specific example, the lysosomal storage disease gene is an Idua gene. Idua encodes alpha-L-iduronidase (also known as IDUA). Pathogenic Idua gene variants cause MPS I. IDUA is involved in the breakdown of large sugar molecules called glycosaminoglycans (GAGs). Mutations in the Idua gene reduce or completely eliminate the function of IDUA. The lack of IDUA activity leads to the accumulation of GAGs within cells, specifically inside the lysosomes.

[0177] Mouse Idua maps to 5 F; 5 53.24 cM on chromosome 5 (NCBI RefSeq Gene ID 15932; Assembly GRCm39 (GCF_000001635.27); location NC_000071.7 (108808197 . . . 108833312)). The gene has been reported to have 15 exons. The mouse IDUA protein has been assigned UniProt Accession No. P48441. The sequence for the mouse IDUA protein (NCBI Accession No. NP_032351.2) is set forth in SEQ ID NO: 4. An mRNA (cDNA) encoding the canonical isoform is assigned NCBI Accession No. NM_008325.4 and is set forth in SEQ ID NO: 5. An exemplary coding sequence (CDS) for the canonical isoform is set forth in SEQ ID NO: 6 (CCDS ID CCDS19516.2). The full-length mouse IDUA protein set forth in SEQ ID NO: 4 has 643 amino acids, including a signal peptide (amino acids 1-25) and an intracellular domain (amino acids 26-643). Delineations between these domains are as designated in UniProt. Reference to mouse IDUA includes the canonical isoform set forth in SEQ ID NO: 4 as well as all allelic forms and isoforms. Any other forms of mouse IDUA have amino acids numbered for maximal alignment with the canonical isoform, aligned amino acids being designated the same number. Rat ARSB protein has been assigned UniProt Accession No. D3ZE16 and NCBI GeneID 360904. Human IDUA protein has been assigned UniProt Accession No. P35475 and NCBI GeneID 3425.

### B. Reverse-Conditional Null Lysosomal Storage Disease Genes

[0178] Disclosed herein are reverse-conditional null endogenous lysosomal storage disease genes (e.g., reverse-conditional null endogenous mucopolysaccharidosis genes, reverse-conditional null endogenous Arsb genes, or reverse-conditional null endogenous Idua genes). Such reverse-conditional null endogenous lysosomal storage disease genes are null endogenous lysosomal storage disease genes that are converted to a functional endogenous lysosomal storage disease gene in response to a signal. For example, such reverse-conditional null endogenous lysosomal storage disease genes can be a null endogenous lysosomal storage disease gene that is converted to a functional endogenous lysosomal storage disease gene upon treatment with a recombinase.

[0179] A reverse-conditional null gene or allele is a gene or allele that is null but can be converted to a functional gene or allele in response to a signal (i.e., the gene or allele is inactive until the signal, in which case the gene or allele's expression and function return to normal compared to an unmodified gene or allele). For example, a reverse-conditional null gene or allele can be a gene or allele that is null but can be converted to a functional gene or allele upon treatment with a recombinase. A null gene or allele is a nonfunctional gene or allele caused by a genetic mutation. Such mutations can cause a complete lack of production of the associated gene product or a product that does not function properly; in either case, the gene or allele may be considered nonfunctional. A null allele cannot be distinguished from deletion of the entire locus solely from phenotypic observation. In a specific example, the reverse-conditional null gene or allele is inactivated by inversion of a critical region of the gene or allele (e.g., a critical region of its coding sequence) so that it is an orientation opposite to the gene's or allele's direction of transcription. The reverse-conditional null gene or allele can then be converted to a functionally wild type allele by inversion (i.e., reinversion) of the inverted critical region (i.e., inversion back to the same orientation as the gene's or allele's direction of transcription). Thus, reverse-conditional null genes or alleles can be used to explore the effect of restoration of gene function at different times and in different tissues.

[0180] In a specific example, a critical region of the endogenous lysosomal storage disease gene is inverted and flanked by recombinase recognition sites in the reverse-conditional null endogenous lysosomal storage disease gene, wherein the recombinase recognition sites are oriented such that the critical region is inverted (i.e., reinverted) upon treatment with a recombinase. Site-specific recombinases include enzymes that can facilitate recombination between recombinase recognition sites, where the two recombination sites are physically separated within a single nucleic acid or on separate nucleic acids. Recombinases are able to either delete sequences between the site-specific recombination sites if the sites are oriented in the same direction with respect to one another or invert the sequences between the site-specific recombination sites if the sites are oriented in opposite directions with respect to one another. Examples of recombinases include Cre, Flp, and Dre recombinases. One example of a Cre recombinase gene is Crei, in which two exons encoding the Cre recombinase are separated by an intron to prevent its expression in a prokaryotic cell. Such recombinases can further comprise a nuclear localization signal to facilitate localization to the nucleus (e.g., NLS-Crei). Recombinase recognition sites include nucleotide sequences that are recognized by a site-specific recombinase and can serve as a substrate for a recombination event. Examples of recombinase recognition sites include FRT, FRT11, FRT71, attp, att, rox, and lox sites such as loxP, lox511, lox2272, lox66, lox71, loxM2, and lox5171.

[0181] In one example, the recombinase is a Cre recombinase, and the site-specific recombination sites are Lox sites. For example, the site-specific recombination sites can comprise a lox66 site and a lox71 site (e.g., lox66 flanking the 5′ end and lox71 flanking the 3′ end). Cre-mediated inversion can convert the lox66-lox71 pair into an lox72-loxP pair, which does not support reinversion. In another specific example, the recombinase is a Flp recombinase, and the site-specific recombination sites are FRT sites. In another specific example, the recombinase is a Dre recombinase, and the site-specific recombination sites are rox sites.

[0182] A critical region of a gene or allele is a region of a gene or allele that is required for expression or activity of the gene or allele. For example, a critical region of a gene or allele can comprise a critical region of its coding sequence. In one example, a gene or allele without the critical region (or with the critical region inverted) will not be expressed. In another example, a gene or allele without the critical region (or with the critical region inverted) will be expressed, but the resulting gene product will be nonfunctional. In a specific example, the reverse-conditional null endogenous lysosomal storage disease gene is a reverse-conditional null endogenous Arsb gene, and the critical region comprises exon 5 of the endogenous Arsb gene (e.g., endogenous mouse Arsb gene). In another specific example, the reverse-conditional null endogenous lysosomal storage disease gene is a reverse-conditional null endogenous Idua gene, and the critical region comprises exon 2 to the stop codon of the endogenous Idua gene (e.g., endogenous mouse Idua gene).

[0183] The non-human animal genomes, non-human animal cells, and non-human animals described herein can further comprise a recombinase expression cassette that drives expression of the site-specific recombinase. The recombinase expression cassette can be genomically integrated. The recombinase gene in a recombinase expression cassette can be operably linked to any suitable promoter. Examples of promoters are disclosed elsewhere herein. For example, the promoter can be a tissue-specific promoter or a developmental-stage-specific promoter. The advantage provided by such promoters is that recombinase expression can be activated selectively in a desired tissue or only at a desired developmental stage. Such promoters are well-known.

[0184] Recombinase expression cassettes or recombinases can also be inducible, wherein expression of the recombinase or recombinase activity is induced in response to a particular signal. For example, the recombinase can be inducible upon treatment with tamoxifen. This offers both cell type-specific and temporal control of conditional gene inactivation. A specific example is a tamoxifen-inducible Cre recombinase, which can utilize a tamoxifen-inducible Cre-estrogen receptor (ER) fusion protein. Cre is fused with the ligand-binding domain of a mutated ligand-binding domain of ER, which does not bind to estrogen but binds to tamoxifen with high affinity. Cre-ER proteins are sequestered in the cytoplasm via association with the HSP90 chaperone. Upon addition of tamoxifen, tamoxifen-bound Cre-ER dissociates from HSP90, translocates into the nucleus, and carries out site-specific recombination between flanking lox sites. In a specific example, the Cre recombinase is Cre-ER^{T2}, in which additional mutations have been engineered into the ER ligand-binding domain to bind tamoxifen with a higher affinity.

[0185] In a specific example, a recombinase expression cassette is integrated into the genome at a safe harbor locus (e.g., a Rosa26 locus). Safe harbor loci include chromosomal loci where transgenes or other exogenous nucleic acid inserts can be stably and reliably expressed in all tissues of interest without overtly altering cell behavior or phenotype (i.e., without any deleterious effects on the host cell). See, e.g., Sadelain et al. (2012) Nat. Rev. Cancer 12:51-58, herein incorporated by reference in its entirety for all purposes. For example, the safe harbor locus can be one in which expression of the inserted gene sequence is not perturbed by any read-through expression from neighboring genes. For example, safe harbor loci can include chromosomal loci where exogenous DNA can integrate and function in a predictable manner without adversely affecting endogenous gene structure or expression. Safe harbor loci can include extragenic regions or intragenic regions such as, for example, loci within genes that are non-essential, dispensable, or able to be disrupted without overt phenotypic consequences. For example, the Rosa26 locus and its equivalent in humans offer an open chromatin configuration in all tissues and is ubiquitously expressed during embryonic development and in adults. See, e.g., Zambrowicz et al. (1997) Proc. Natl. Acad. Sci. USA 94:3789-3794, herein incorporated by reference in its entirety for all purposes. In addition, the Rosa26 locus can be targeted with high efficiency, and disruption of the Rosa26 gene produces no overt phenotype. Other examples of safe harbor loci include CCR5, HPRT, AAVS1, and albumin. See, e.g., U.S. Pat. Nos. 7,888,121; 7,972,854; 7,914,796; 7,951,925; 8,110,379; 8,409,861; 8,586,526; and US Patent Publication Nos. 2003/0232410; 2005/0208489; 2005/0026157; 2006/0063231; 2008/0159996; 2010/00218264; 2012/0017290; 2011/0265198; 2013/0137104; 2013/0122591; 2013/0177983; 2013/0177960; and 2013/0122591, each of which is herein incorporated by reference in its entirety for all purposes. In a specific example, a recombinase expression cassette is integrated into the genome at a Rosa26 locus. In another specific example, a Cre-ERT^{T2} expression cassette is integrated into the genome at a Rosa26 locus.

[0186] Optionally, a reverse-conditional null endogenous lysosomal storage disease gene can comprise other elements. Examples of such elements can include selection cassettes, reporter genes, recombinase recognition sites, or other elements. Alternatively, the reverse-conditional null endogenous lysosomal storage disease gene can lack other elements (e.g., can lack a selection marker or selection cassette). Examples of suitable reporter genes and reporter proteins are disclosed elsewhere herein. Examples of suitable selection markers include neomycin phosphotransferase (neor), hygromycin B phosphotransferase (hygr), puromycin-N-acetyltransferase (puror), blasticidin S deaminase (bsrr), xanthine/guanine phosphoribosyl transferase (gpt), and herpes simplex virus thymidine kinase (HSV-k). Examples of recombinases include Cre, Flp, and Dre recombinases. One example of a Cre recombinase gene is Crei, in which two exons encoding the Cre recombinase are separated by an intron to prevent its expression in a prokaryotic cell. Such recombinases can further comprise a nuclear localization signal to facilitate localization to the nucleus (e.g., NLS-Crei). Recombinase recognition sites include nucleotide sequences that are recognized by a site-specific recombinase and can serve as a substrate for a recombination event. Examples of recombinase recognition sites include FRT, FRT11, FRT71, attp, att, rox, and lox sites such as loxP, lox511, lox2272, lox66, lox71, loxM2, and lox5171.

[0187] Other elements such as reporter genes or selection cassettes can be self-deleting cassettes flanked by recombinase recognition sites. See, e.g., U.S. Pat. No. 8,697,851 and US 2013/0312129, each of which is herein incorporated by reference in its entirety for all purposes. The recombinase recognition sites in the self-deleting cassette can be different from the recombinase recognition sites used for rescue of the reverse-conditional null endogenous lysosomal storage disease gene. For example, the recombinase recognition sites used for rescue of the reverse-conditional null endogenous lysosomal storage disease gene can be lox sites (e.g., lox71 and lox66), and the recombinase recognition sites flanking the self-deleting cassette can be rox sites. As an example, the self-deleting cassette can comprise a Cre recombinase gene or a Dre recombinase gene operably linked to a mouse Prm1 promoter and a neomycin resistance gene operably linked to a human ubiquitin promoter. By employing the Prm1 promoter, the self-deleting cassette can be deleted specifically in male germ cells of F0 animals. The polynucleotide encoding the selection marker can be operably linked to a promoter active in a cell being targeted. Examples of promoters are described elsewhere herein. As another specific example, a self-deleting selection cassette can comprise a hygromycin resistance gene coding sequence operably linked to one or more promoters (e.g., both human ubiquitin and EM7 promoters) followed by a polyadenylation signal, followed by a Cre coding sequence or Dre coding sequence operably linked to one or more promoters (e.g., an mPrm1 promoter), followed by another polyadenylation signal, wherein the entire cassette is flanked by loxP sites or rox sites.

[0188] The reverse-conditional null endogenous lysosomal storage disease gene can be a multifunctional allele as described in US 2011/0104799, herein incorporated by reference in its entirety for all purposes. For example, the conditional allele can comprise: (a) an actuating sequence in sense orientation with respect to transcription of a target gene; (b) a drug selection cassette (DSC) in sense or antisense orientation; (c) a nucleotide sequence of interest (NSI) in antisense orientation; and (d) a conditional by inversion module (COIN, which utilizes an exon-splitting intron and an invertible gene-trap-like module) in reverse orientation. See, e.g., US 2011/0104799. The conditional allele can further comprise recombinable units that recombine upon exposure to a first recombinase to form a conditional allele that (i) lacks the actuating sequence and the DSC; and (ii) contains the NSI in sense orientation and the COIN in antisense orientation. See, e.g., US 2011/0104799.

[0189] One exemplary reverse-conditional null endogenous lysosomal storage disease gene is a reverse-conditional null endogenous Arsb gene. For example, the reverse-conditional null endogenous Arsb gene can be one in which a region comprising exon 5 of the endogenous Arsb gene is inverted and flanked by recombinase recognition sites, the recombinase recognition sites are oriented such that the region is inverted upon treatment with the recombinase, the recombinase is a Cre recombinase, and the recombinase recognition sites comprise a lox71 site and a lox66 site, and a non-human animal comprising the reverse-conditional null endogenous Arsb gene displays one or more phenotypes associated with mucopolysaccharidosis VI. In a specific example, the reverse-conditional null endogenous Arsb gene comprises the sequence set forth in SEQ ID NO: 47 or is at least about 95%, at least about 96%, at least about 97%, at least about 98%, or at least about 99% identical to SEQ ID NO: 47. In a specific example, the reverse-conditional null endogenous Arsb gene comprises the sequence set forth in SEQ ID NO: 7 or 8 or is at least about 95%, at least about 96%, at least about 97%, at least about 98%, or at least about 99% identical to SEQ ID NO: 7 or 8. In a specific example, upon treatment the reverse-conditional null endogenous Arsb gene comprises the sequence set forth in SEQ ID NO: 48 or is at least about 95%, at least about 96%, at least about 97%, at least about 98%, or at least about 99% identical to SEQ ID NO: 48. In a specific example, upon treatment the reverse-conditional null endogenous Arsb gene comprises the sequence set forth in SEQ ID NO: 9 or is at least about 95%, at least about 96%, at least about 97%, at least about 98%, or at least about 99% identical to SEQ ID NO: 9.

[0190] Another exemplary reverse-conditional null endogenous lysosomal storage disease gene is a reverse-conditional null endogenous Idua gene. For example, the reverse-conditional null endogenous Idua gene can be one in which a region comprising exon 2 to the stop codon of the endogenous Idua gene is inverted and flanked by recombinase recognition sites, the recombinase recognition sites are oriented such that the region is inverted upon treatment with the recombinase, the recombinase is a Cre recombinase, and the recombinase recognition sites comprise a lox71 site and a lox66 site, and a non-human animal comprising the reverse-conditional null endogenous Idua gene displays one or more phenotypes associated with mucopolysaccharidosis I. In a specific example, the reverse-conditional null endogenous Idua gene comprises the sequence set forth in SEQ ID NO: 49 or is at least about 95%, at least about 96%, at least about 97%, at least about 98%, or at least about 99% identical to SEQ ID NO: 49. In a specific example, the reverse-conditional null endogenous Idua gene comprises the sequence set forth in SEQ ID NO: 10 or 11 or is at least about 95%, at least about 96%, at least about 97%, at least about 98%, or at least about 99% identical to SEQ ID NO: 10 or 11. In a specific example, upon treatment the reverse-conditional null endogenous Idua gene comprises the sequence set forth in SEQ ID NO: 50 or is at least about 95%, at least about 96%, at least about 97%, at least about 98%, or at least about 99% identical to SEQ ID NO: 50. In a specific example, upon treatment the reverse-conditional null endogenous Idua gene comprises the sequence set forth in SEQ ID NO: 12 or is at least about 95%, at least about 96%, at least about 97%, at least about 98%, or at least about 99% identical to SEQ ID NO: 12.

### C. Non-Human Animal Genomes, Non-Human Animal Cells, and Non-Human Animals Comprising a Reverse-Conditional Null Endogenous Lysosomal Storage Disease Gene

[0191] Non-human animal genomes, non-human animal cells, and non-human animals comprising in their genome a reverse-conditional null endogenous lysosomal storage disease gene as described elsewhere herein are provided. The genomes, cells, or non-human animals can be male or female. The genomes, cells, or non-human animals can be heterozygous or homozygous for the reverse-conditional null endogenous lysosomal storage disease gene. A diploid organism has two alleles at each genetic locus. Each pair of alleles represents the genotype of a specific genetic locus. Genotypes are described as homozygous if there are two identical alleles at a particular locus and as heterozygous if the two alleles differ. A non-human animal comprising a reverse-conditional null endogenous lysosomal storage disease gene can comprise the reverse-conditional null endogenous lysosomal storage disease gene in its germline.

[0192] The non-human animal genomes or cells provided herein can be, for example, any non-human animal genome or cell comprising a lysosomal storage disease gene, a mucopolysaccharidosis gene, an Arsb gene, or an Idua gene or a genomic locus homologous or orthologous to a human lysosomal storage disease gene, mucopolysaccharidosis gene, Arsb gene, or Idua gene. The genomes can be from or the cells can be eukaryotic cells, which include, for example, animal cells, mammalian cells, non-human mammalian cells, and human cells. The term “animal” includes any member of the animal kingdom, including, for example, mammals, fishes, reptiles, amphibians, birds, and worms. A mammalian cell can be, for example, a non-human mammalian cell, a rodent cell, a rat cell, or a mouse cell. Other non-human mammals include, for example, non-human primates. The term “non-human” excludes humans.

[0193] The cells can also be any type of undifferentiated or differentiated state. For example, a cell can be a totipotent cell, a pluripotent cell (e.g., a human pluripotent cell or a non-human pluripotent cell such as a mouse embryonic stem (ES) cell or a rat ES cell), or a non-pluripotent cell (e.g., a non-ES cell). Totipotent cells include undifferentiated cells that can give rise to any cell type, and pluripotent cells include undifferentiated cells that possess the ability to develop into more than one differentiated cell types. Such pluripotent and/or totipotent cells can be, for example, ES cells or ES-like cells, such as an induced pluripotent stem (iPS) cells. ES cells include embryo-derived totipotent or pluripotent cells that are capable of contributing to any tissue of the developing embryo upon introduction into an embryo. ES cells can be derived from the inner cell mass of a blastocyst and are capable of differentiating into cells of any of the three vertebrate germ layers (endoderm, ectoderm, and mesoderm).

[0194] The cells provided herein can also be germ cells (e.g., sperm or oocytes). The cells can be mitotically competent cells or mitotically-inactive cells, meiotically competent cells or meiotically-inactive cells. Similarly, the cells can also be primary somatic cells or cells that are not a primary somatic cell. Somatic cells include any cell that is not a gamete, germ cell, gametocyte, or undifferentiated stem cell.

[0195] Suitable cells provided herein also include primary cells. Primary cells include cells or cultures of cells that have been isolated directly from an organism, organ, or tissue. Primary cells include cells that are neither transformed nor immortal. They include any cell obtained from an organism, organ, or tissue which was not previously passed in tissue culture or has been previously passed in tissue culture but is incapable of being indefinitely passed in tissue culture.

[0196] Other suitable cells provided herein include immortalized cells. Immortalized cells include cells from a multicellular organism that would normally not proliferate indefinitely but, due to mutation or alteration, have evaded normal cellular senescence and instead can keep undergoing division. Such mutations or alterations can occur naturally or be intentionally induced. Numerous types of immortalized cells are well known. Immortalized or primary cells include cells that are typically used for culturing or for expressing recombinant genes or proteins.

[0197] The cells provided herein also include one-cell stage embryos (i.e., fertilized oocytes or zygotes). Such one-cell stage embryos can be from any genetic background (e.g., BALB/c, C57BL/6, 129, or a combination thereof for mice), can be fresh or frozen, and can be derived from natural breeding or in vitro fertilization.

[0198] The cells provided herein can be normal, healthy cells, or can be diseased or mutant-bearing cells.

[0199] Non-human animals comprising a reverse-conditional null endogenous lysosomal storage disease gene as described herein can be made by the methods described elsewhere herein. The term “animal” includes any member of the animal kingdom, including, for example, mammals, fishes, reptiles, amphibians, birds, and worms. In a specific example, the non-human animal is a non-human mammal. Non-human mammals include, for example, non-human primates and rodents (e.g., mice and rats). The term “non-human animal” excludes humans. Preferred non-human animals include, for example, rodents, such as mice and rats.

[0200] The non-human animals can be from any genetic background. For example, suitable mice can be from a 129 strain, a C57BL/6 strain, a mix of 129 and C57BL/6, a BALB/c strain, or a Swiss Webster strain. Examples of 129 strains include 129P1, 129P2, 129P3, 129X1, 129S1 (e.g., 129S1/SV, 129S1/Sv1m), 129S2, 129S4, 129S5, 129S9/SvEvH, 129S6 (129/SvEvTac), 129S7, 129S8, 129T1, and 129T2. See, e.g., Festing et al. (1999) Mamm. Genome 10(8):836, herein incorporated by reference in its entirety for all purposes. Examples of C57BL strains include C57BL/A, C57BL/An, C57BL/GrFa, C57BL/Kal_wN, C57BL/6, C57BL/6J, C57BL/6ByJ, C57BL/6NJ, C57BL/10, C57BL/10ScSn, C57BL/10Cr, and C57BL/O1a. Suitable mice can also be from a mix of an aforementioned 129 strain and an aforementioned C57BL/6 strain (e.g., 50% 129 and 50% C57BL/6). Likewise, suitable mice can be from a mix of aforementioned 129 strains or a mix of aforementioned BL/6 strains (e.g., the 129S6 (129/SvEvTac) strain).

[0201] Similarly, rats can be from any rat strain, including, for example, an ACI rat strain, a Dark Agouti (DA) rat strain, a Wistar rat strain, a LEA rat strain, a Sprague Dawley (SD) rat strain, or a Fischer rat strain such as Fisher F344 or Fisher F6. Rats can also be obtained from a strain derived from a mix of two or more strains recited above. For example, a suitable rat can be from a DA strain or an ACI strain. The ACI rat strain is characterized as having black agouti, with white belly and feet and an RT1^{av1} haplotype. Such strains are available from a variety of sources including Harlan Laboratories. The Dark Agouti (DA) rat strain is characterized as having an agouti coat and an RT1^{av1} haplotype. Such rats are available from a variety of sources including Charles River and Harlan Laboratories. Some suitable rats can be from an inbred rat strain. See, e.g., US 2014/0235933, herein incorporated by reference in its entirety for all purposes.

[0202] In one specific example, a non-human animal (e.g., mouse) comprising in its genome a reverse-conditional null endogenous lysosomal storage disease gene as described elsewhere herein comprises a reverse-conditional null endogenous Arsb gene. The non-human animal can display one or more phenotypes associated with mucopolysaccharidosis VI, such as one or more skeletal phenotypes associated with mucopolysaccharidosis VI. For example, the non-human animal can display one or more or all of the following relative to a wild type non-human animal: (a) increased accumulation of glycosaminoglycans in the liver; (b) increased accumulation of glycosaminoglycans in the heart; (c) increased accumulation of glycosaminoglycans in the kidney; (d) decreased tibia length; (e) decreased spinal column length; (f) increased tibial growth plate width; and (g) decreased cranial length:width ratio. In one example, the non-human animal displays increased accumulation of glycosaminoglycans in the liver. In another example, the non-human animal displays increased accumulation of glycosaminoglycans in the heart. In another example, the non-human animal displays increased accumulation of glycosaminoglycans in the kidney. In another example, the non-human animal displays decreased tibia length. In another example, the non-human animal displays decreased spinal column length. In another example, the non-human animal displays increased tibial growth plate width. In another example, the non-human animal displays decreased cranial length:width ratio. In another example, the non-human animal displays: (a) increased accumulation of glycosaminoglycans in the liver; (b) increased accumulation of glycosaminoglycans in the heart; (c) increased accumulation of glycosaminoglycans in the kidney; (d) decreased tibia length; (e) decreased spinal column length; (f) increased tibial growth plate width; and (g) decreased cranial length:width ratio. In a specific example, the non-human animal displays the decreased tibia length, wherein the decreased tibia length is rescuable within one month after treatment with the recombinase at post-natal day 7 (or earlier) but is not rescuable within one month after treatment with the recombinase at post-natal day 21 (or later) or at 8-10 weeks (or later) (e.g., 8 weeks (or later)) after birth. In another specific example, the non-human animal displays the decreased spinal column length, wherein the decreased spinal column length is rescuable within one month after treatment with the recombinase at post-natal day 7 (or earlier) but is not rescuable within one month after treatment with the recombinase at post-natal day 21 (or later) or at 8-10 weeks (or later) (e.g., 8 weeks (or later)) after birth. In another specific example, the non-human animal displays the increased tibial growth plate width, wherein the increased tibial growth plate width is rescuable within one month after treatment with the recombinase at post-natal day 7 (or earlier) but is not rescuable within one month after treatment with the recombinase at post-natal day 21 (or later) or at 8-10 weeks (or later) (e.g., 8 weeks (or later)) after birth. In another specific example, the non-human animal displays the decreased cranial length:width ratio, wherein the decreased cranial length:width ratio is rescuable within one month after treatment with the recombinase at post-natal day 7 (or earlier) but is not rescuable within one month after treatment with the recombinase at post-natal day 21 (or later) or at 8-10 weeks (or later) (e.g., 8 weeks (or later)) after birth. In a specific example, the non-human animal displays the decreased tibia length, wherein the decreased tibia length is rescuable within three months after treatment with the recombinase at post-natal day 7 (or earlier) but is not rescuable within three months after treatment with the recombinase at post-natal day 21 (or later) or at 8-10 weeks (or later) (e.g., 8 weeks (or later)) after birth. In another specific example, the non-human animal displays the decreased spinal column length, wherein the decreased spinal column length is rescuable within three months after treatment with the recombinase at post-natal day 7 (or earlier) but is not rescuable within three months after treatment with the recombinase at post-natal day 21 (or later) or at 8-10 weeks (or later) (e.g., 8 weeks (or later)) after birth. In another specific example, the non-human animal displays the increased tibial growth plate width, wherein the increased tibial growth plate width is rescuable within three months after treatment with the recombinase at post-natal day 7 (or earlier) but is not rescuable within three months after treatment with the recombinase at post-natal day 21 (or later) or at 8-10 weeks (or later) (e.g., 8 weeks (or later)) after birth. In another specific example, the non-human animal displays the decreased cranial length:width ratio, wherein the decreased cranial length:width ratio is rescuable within three months after treatment with the recombinase at post-natal day 7 (or earlier) but is not rescuable within three months after treatment with the recombinase at post-natal day 21 (or later) or at 8-10 weeks (or later) (e.g., 8 weeks (or later)) after birth.

[0203] In another specific example, a non-human animal (e.g., mouse) comprising in its genome a reverse-conditional null endogenous lysosomal storage disease gene as described elsewhere herein comprises a reverse-conditional null endogenous Idua gene. The non-human animal can display one or more phenotypes associated with mucopolysaccharidosis I. The non-human animal can display one or more skeletal phenotypes associated with mucopolysaccharidosis I. For example, the non-human animal can display one or more or all of the following relative to a wild type non-human animal: (a) increased accumulation of glycosaminoglycans in the liver; (b) increased accumulation of glycosaminoglycans in the heart; (c) increased accumulation of glycosaminoglycans in the kidney; (d) decreased tibia length; (e) decreased spinal column length; (f) decreased ribcage width; and (g) decreased cranial length:width ratio. In one example, the non-human animal displays increased accumulation of glycosaminoglycans in the liver. In another example, the non-human animal displays increased accumulation of glycosaminoglycans in the heart. In another example, the non-human animal displays increased accumulation of glycosaminoglycans in the kidney. In another example, the non-human animal displays decreased tibia length. In another example, the non-human animal displays decreased spinal column length. In another example, the non-human animal displays decreased ribcage width. In another example, the non-human animal displays decreased cranial length:width ratio. In another example, the non-human animal displays: (a) increased accumulation of glycosaminoglycans in the liver; (b) increased accumulation of glycosaminoglycans in the heart; (c) increased accumulation of glycosaminoglycans in the kidney; (d) decreased tibia length; (e) decreased spinal column length; (f) decreased ribcage width; and (g) decreased cranial length:width ratio. The non-human animal can display one or more neurological phenotypes associated with mucopolysaccharidosis I. For example, the non-human animal can display one or more or all of the following relative to a wild type non-human animal: (a) decreased exploratory behavior (e.g., decreased number of rearings in an open field test); (b) decreased anxiety-related behavior (e.g., in marble-burying tasks or in an elevated plus maze); (c) impaired long-term memory retention (e.g., in a fear conditioning and memory test); and (d) increased escape latency (e.g., in a Barnes maze). In one example, the non-human animal displays decreased exploratory behavior (e.g., decreased number of rearings in an open field test). In another example, the non-human animal displays decreased anxiety-related behavior (e.g., in marble-burying tasks or in an elevated plus maze). In another example, the non-human animal displays impaired long-term memory retention (e.g., in a fear conditioning and memory test). In another example, the non-human animal displays increased escape latency (e.g., in a Barnes maze). In another example, the non-human animal displays: (a) decreased exploratory behavior (e.g., decreased number of rearings in an open field test); (b) decreased anxiety-related behavior (e.g., in marble-burying tasks or in an elevated plus maze); (c) impaired long-term memory retention (e.g., in a fear conditioning and memory test); and (d) increased escape latency (e.g., in a Barnes maze). The non-human animal can display one or more skeletal phenotypes associated with mucopolysaccharidosis I and one or more neurological phenotypes associated with mucopolysaccharidosis I.

### III. Methods of Making Non-Human Animals Comprising a Reverse-Conditional Null Endogenous Lysosomal Storage Disease Gene

[0204] Various methods are provided for making a non-human animal genome, non-human animal cell, or non-human animal comprising a reverse-conditional null endogenous lysosomal storage disease gene (e.g., a reverse-conditional null endogenous mucopolysaccharidosis gene, a reverse-conditional null endogenous Arsb gene, or a reverse-conditional null endogenous Idua gene) as disclosed elsewhere herein. Likewise, various methods are provided for making a reverse-conditional null endogenous lysosomal storage disease gene (e.g., a reverse-conditional null endogenous mucopolysaccharidosis gene, a reverse-conditional null endogenous Arsb gene, or a reverse-conditional null endogenous Idua gene) or for making a non-human animal genome or non-human animal cell comprising a reverse-conditional null endogenous lysosomal storage disease gene (e.g., a reverse-conditional null endogenous mucopolysaccharidosis gene, a reverse-conditional null endogenous Arsb gene, or a reverse-conditional null endogenous Idua gene) as disclosed elsewhere herein. Any convenient method or protocol for producing a genetically modified organism is suitable for producing such a genetically modified non-human animal. See, e.g., Poueymirou et al. (2007) Nat. Biotechnol. 25(1):91-99; U.S. Pat. Nos. 7,294,754; 7,576,259; 7,659,442; 8,816,150; 9,414,575; 9,730,434; and 10,039,269, each of which is herein incorporated by reference in its entirety for all purposes (describing mouse ES cells and the VELOCIMOUSE® method for making a genetically modified mouse). See also US 2014/0235933 A1, US 2014/0310828 A1, each of which is herein incorporated by reference in its entirety for all purposes (describing rat ES cells and methods for making a genetically modified rat). See also Cho et al. (2009) Curr. Protoc. Cell. Biol. 42:19.11.1-19.11.22 (doi: 10.1002/0471143030.cb1911s42) and Gama Sosa et al. (2010) Brain Struct. Funct. 214(2-3):91-109, each of which is herein incorporated by reference in its entirety for all purposes. Such genetically modified non-human animals can be generated, for example, through gene knock-in at a targeted lysosomal storage disease, mucopolysaccharidosis, Arsb, or Idua locus.

[0205] For example, the method of producing a non-human animal comprising the reverse-conditional null endogenous lysosomal storage disease gene can comprise: (1) providing a pluripotent cell (e.g., an embryonic stem (ES) cell such as a mouse ES cell or a rat ES cell) comprising the reverse-conditional null endogenous lysosomal storage disease gene; (2) introducing the genetically modified pluripotent cell into a non-human animal host embryo; and (3) gestating the host embryo in a surrogate non-human animal mother.

[0206] As another example, the method of producing a non-human animal comprising a reverse-conditional null endogenous lysosomal storage disease gene can comprise: (1) modifying the genome of a non-human animal pluripotent cell (e.g., an embryonic stem (ES) cell such as a mouse ES cell or a rat ES cell) to comprise the reverse-conditional null endogenous lysosomal storage disease gene; (2) identifying or selecting the genetically modified non-human animal pluripotent cell comprising the reverse-conditional null endogenous lysosomal storage disease gene; (3) introducing the genetically modified non-human animal pluripotent cell into a non-human animal host embryo; and (4) gestating the non-human animal host embryo in a non-human animal surrogate mother. The donor cell can be introduced into a host embryo at any stage, such as the blastocyst stage or the pre-morula stage (i.e., the 4 cell stage or the 8 cell stage). Optionally, the host embryo comprising modified pluripotent cell (e.g., a non-human ES cell) can be incubated until the blastocyst stage before being implanted into and gestated in the surrogate mother to produce an F0 non-human animal. The surrogate mother can then produce an F0 generation non-human animal comprising the reverse-conditional null endogenous lysosomal storage disease gene (and capable of transmitting the genetic modification through the germline).

[0207] Alternatively, the method of producing the non-human animals described elsewhere herein can comprise: (1) modifying the genome of a non-human animal one-cell stage embryo to comprise the reverse-conditional null endogenous lysosomal storage disease gene (e.g., using the methods described above for modifying pluripotent cells); (2) selecting the genetically modified non-human animal embryo; and (3) gestating the genetically modified non-human animal embryo in a surrogate non-human animal mother. Progeny that are capable of transmitting the genetic modification though the germline are generated.

[0208] Nuclear transfer techniques can also be used to generate the non-human mammalian animals. Briefly, methods for nuclear transfer can include the steps of: (1) enucleating an oocyte or providing an enucleated oocyte; (2) isolating or providing a donor cell or nucleus to be combined with the enucleated oocyte; (3) inserting the cell or nucleus into the enucleated oocyte to form a reconstituted cell; (4) implanting the reconstituted cell into the womb of an animal to form an embryo; and (5) allowing the embryo to develop. In such methods, oocytes are generally retrieved from deceased animals, although they may be isolated also from either oviducts and/or ovaries of live animals. Oocytes can be matured in a variety of well-known media prior to enucleation. Enucleation of the oocyte can be performed in a number of well-known manners. Insertion of the donor cell or nucleus into the enucleated oocyte to form a reconstituted cell can be by microinjection of a donor cell under the zona pellucida prior to fusion. Fusion may be induced by application of a DC electrical pulse across the contact/fusion plane (electrofusion), by exposure of the cells to fusion-promoting chemicals, such as polyethylene glycol, or by way of an inactivated virus, such as the Sendai virus. A reconstituted cell can be activated by electrical and/or non-electrical means before, during, and/or after fusion of the nuclear donor and recipient oocyte. Activation methods include electric pulses, chemically induced shock, penetration by sperm, increasing levels of divalent cations in the oocyte, and reducing phosphorylation of cellular proteins (as by way of kinase inhibitors) in the oocyte. The activated reconstituted cells, or embryos, can be cultured in well-known media and then transferred to the womb of an animal. See, e.g., US 2008/0092249, WO 1999/005266, US 2004/0177390, WO 2008/017234, and U.S. Pat. No. 7,612,250, each of which is herein incorporated by reference in its entirety for all purposes.

[0209] The modified cell or one-cell stage embryo can be generated, for example, through recombination by (a) introducing into the cell one or more exogenous donor nucleic acids (e.g., targeting vectors) comprising an insert nucleic acid flanked, for example, by 5′ and 3′ homology arms corresponding to 5′ and 3′ target sites (e.g., target sites flanking the endogenous sequences intended for deletion and replacement with the insert nucleic acid), wherein the insert nucleic acid comprises a portion of the reverse-conditional null endogenous lysosomal storage disease gene (e.g., an inverted portion of the endogenous lysosomal storage disease gene flanked by recombinase recognition sites) to generate the reverse-conditional null endogenous lysosomal storage disease gene; and (b) identifying at least one cell comprising in its genome the insert nucleic acid integrated at the endogenous lysosomal storage disease gene locus (i.e., identifying at least one cell comprising the reverse-conditional null endogenous lysosomal storage disease gene). Likewise, a modified non-human animal genome or humanized non-human animal reverse-conditional null endogenous lysosomal storage disease gene can be generated, for example, through recombination by (a) contacting the genome or gene with one or more exogenous donor nucleic acids (e.g., targeting vectors) comprising 5′ and 3′ homology arms corresponding to 5′ and 3′ target sites (e.g., target sites flanking the endogenous sequences intended for deletion and replacement with an insert nucleic acid (e.g., comprising a portion of the reverse-conditional null endogenous lysosomal storage disease gene (e.g., an inverted portion of the endogenous lysosomal storage disease gene flanked by recombinase recognition sites) to generate the reverse-conditional null endogenous lysosomal storage disease gene) flanked by the 5′ and 3′ homology arms), wherein the exogenous donor nucleic acids are designed for generating the reverse-conditional null endogenous lysosomal storage disease gene.

[0210] Alternatively, the modified pluripotent cell or one-cell stage embryo can be generated by (a) introducing into the cell: (i) a nuclease agent, wherein the nuclease agent induces a nick or double-strand break at a target site within the endogenous lysosomal storage disease gene locus; and (ii) one or more exogenous donor nucleic acids (e.g., targeting vectors) comprising an insert nucleic acid flanked by, for example, 5′ and 3′ homology arms corresponding to 5′ and 3′ target sites (e.g., target sites flanking the endogenous sequences intended for deletion and replacement with the insert nucleic acid), wherein the insert nucleic acid comprises a portion of the reverse-conditional null endogenous lysosomal storage disease gene (e.g., an inverted portion of the endogenous lysosomal storage disease gene flanked by recombinase recognition sites) to generate the reverse-conditional null endogenous lysosomal storage disease gene; and (c) identifying at least one cell comprising in its genome the insert nucleic acid integrated at the endogenous lysosomal storage disease gene locus (i.e., identifying at least one cell comprising the reverse-conditional null endogenous lysosomal storage disease gene). Likewise, a modified non-human animal genome or humanized non-human animal reverse-conditional null endogenous lysosomal storage disease gene can be generated by contacting the genome or gene with: (i) a nuclease agent, wherein the nuclease agent induces a nick or double-strand break at a target site within the endogenous lysosomal storage disease locus or gene; and (ii) one or more exogenous donor nucleic acids (e.g., targeting vectors) comprising an insert nucleic acid (e.g., comprising a portion of the reverse-conditional null endogenous lysosomal storage disease gene (e.g., an inverted portion of the endogenous lysosomal storage disease gene flanked by recombinase recognition sites) to generate reverse-conditional null endogenous lysosomal storage disease gene) flanked by, for example, 5′ and 3′ homology arms corresponding to 5′ and 3′ target sites (e.g., target sites flanking the endogenous sequences intended for deletion and replacement with the insert nucleic acid), wherein the exogenous donor nucleic acids are designed for humanization of the endogenous lysosomal storage disease gene locus. Any nuclease agent that induces a nick or double-strand break into a desired recognition site can be used. Examples of suitable nucleases include a Transcription Activator-Like Effector Nuclease (TALEN), a zinc-finger nuclease (ZFN), a meganuclease, and Clustered Regularly Interspersed Short Palindromic Repeats (CRISPR)/CRISPR-associated (Cas) systems (e.g., CRISPR/Cas9 systems) or components of such systems (e.g., CRISPR/Cas9). See, e.g., US 2013/0309670 and US 2015/0159175, each of which is herein incorporated by reference in its entirety for all purposes. In one example, the nuclease comprises a Cas9 protein and a guide RNA. In another example, the nuclease comprises a Cas9 protein and two or more, three or more, or four or more guide RNAs.

[0211] The step of modifying the genome can, for example, utilize exogenous repair templates (e.g., targeting vectors) to modify an endogenous lysosomal storage disease gene locus to comprise the reverse-conditional null endogenous lysosomal storage disease gene locus disclosed herein. As one example, the targeting vector can be for generating the reverse-conditional null endogenous lysosomal storage disease gene, wherein the targeting vector comprises a nucleic acid insert comprising a portion of the reverse-conditional null endogenous lysosomal storage disease gene (e.g., an inverted portion of the endogenous lysosomal storage disease gene flanked by recombinase recognition sites) flanked by a 5′ homology arm targeting a 5′ target sequence at the endogenous lysosomal storage disease gene locus and a 3′ homology arm targeting a 3′ target sequence at the endogenous lysosomal storage disease gene locus. Integration of a nucleic acid insert in the endogenous lysosomal storage disease gene locus can result in addition of a nucleic acid sequence of interest in the endogenous lysosomal storage disease gene locus, deletion of a nucleic acid sequence of interest in the endogenous lysosomal storage disease gene locus, or replacement of a nucleic acid sequence of interest in the endogenous lysosomal storage disease gene locus (i.e., deleting a segment of the endogenous lysosomal storage disease gene locus and replacing with a portion of the reverse-conditional null endogenous lysosomal storage disease gene (e.g., an inverted portion of the endogenous lysosomal storage disease gene flanked by recombinase recognition sites)).

[0212] The exogenous repair templates can be for non-homologous-end-joining-mediated insertion or homologous recombination. Exogenous repair templates can comprise deoxyribonucleic acid (DNA) or ribonucleic acid (RNA), they can be single-stranded or double-stranded, and they can be in linear or circular form. For example, a repair template can be a single-stranded oligodeoxynucleotide (ssODN). Exogenous repair templates can also comprise a heterologous sequence that is not present at an untargeted endogenous lysosomal storage disease gene locus. For example, an exogenous repair template can comprise a selection cassette, such as a selection cassette flanked by recombinase recognition sites.

[0213] In cells other than one-cell stage embryos, the exogenous repair template can be a “large targeting vector” or “LTVEC,” which includes targeting vectors that comprise homology arms that correspond to and are derived from nucleic acid sequences larger than those typically used by other approaches intended to perform homologous recombination in cells. See, e.g., US 2004/0018626; WO 2013/163394; U.S. Pat. Nos. 9,834,786; 10,301,646; WO 2015/088643; U.S. Pat. Nos. 9,228,208; 9,546,384; 10,208,317; and US 2019-0112619, each of which is herein incorporated by reference in its entirety for all purposes. LTVECs also include targeting vectors comprising nucleic acid inserts having nucleic acid sequences larger than those typically used by other approaches intended to perform homologous recombination in cells. For example, LTVECs make possible the modification of large loci that cannot be accommodated by traditional plasmid-based targeting vectors because of their size limitations. For example, the targeted locus can be (i.e., the 5′ and 3′ homology arms can correspond to) a locus of the cell that is not targetable using a conventional method or that can be targeted only incorrectly or only with significantly low efficiency in the absence of a nick or double-strand break induced by a nuclease agent (e.g., a Cas protein). LTVECs can be of any length and are typically at least 10 kb in length. The sum total of the 5′ homology arm and the 3′ homology arm in an LTVEC is typically at least 10 kb. Generation and use of large targeting vectors (LTVECs) derived from bacterial artificial chromosome (BAC) DNA through bacterial homologous recombination (BHR) reactions using VELOCIGENE® genetic engineering technology is described, e.g., in U.S. Pat. No. 6,586,251 and Valenzuela et al. (2003) Nat. Biotechnol. 21(6):652-659, each of which is herein incorporated by reference in its entirety for all purposes. Generation of LTVECs through in vitro assembly methods is described, e.g., in US 2015/0376628 and WO 2015/200334, each of which is herein incorporated by reference in its entirety for all purposes.

[0214] The methods can further comprise identifying a cell or animal having a modified target genomic locus. Various methods can be used to identify cells and animals having a targeted genetic modification. The screening step can comprise, for example, a quantitative assay for assessing modification-of-allele (MOA) of a parental chromosome. See, e.g., US 2004/0018626; US 2014/0178879; US 2016/0145646; WO 2016/081923; and Frendewey et al. (2010) Methods Enzymol. 476:295-307, each of which is herein incorporated by reference in its entirety for all purposes. For example, the quantitative assay can be carried out via a quantitative PCR, such as a real-time PCR (qPCR). The real-time PCR can utilize a first primer set that recognizes the target locus and a second primer set that recognizes a non-targeted reference locus. The primer set can comprise a fluorescent probe that recognizes the amplified sequence. Other examples of suitable quantitative assays include fluorescence-mediated in situ hybridization (FISH), comparative genomic hybridization, isothermic DNA amplification, quantitative hybridization to an immobilized probe(s), INVADER® Probes, TAQMAN® Molecular Beacon probes, or ECLIPSE™ probe technology (see, e.g., US 2005/0144655, incorporated herein by reference in its entirety for all purposes).

[0215] The various methods provided herein allow for the generation of a genetically modified non-human F0 animal wherein the cells of the genetically modified F0 animal comprise the reverse-conditional null endogenous lysosomal storage disease gene. It is recognized that depending on the method used to generate the F0 animal, the number of cells within the F0 animal that have the reverse-conditional null endogenous lysosomal storage disease gene will vary. With mice, for example, the introduction of the donor ES cells into a pre-morula stage embryo from the mouse (e.g., an 8-cell stage mouse embryo) via, for example, the VELOCIMOUSE® method allows for a greater percentage of the cell population of the F0 mouse to comprise cells having the targeted genetic modification. For example, at least 50%, 60%, 65%, 70%, 75%, 85%, 86%, 87%, 87%, 88%, 89%, 90%, 91%, 92%, 93%, 94%, 95%, 96%, 97%, 98%, 99%, or 100% of the cellular contribution of the non-human F0 animal can comprise a cell population having the targeted modification. The cells of the genetically modified F0 animal can be heterozygous for the reverse-conditional null endogenous lysosomal storage disease gene or can be homozygous for the reverse-conditional null endogenous lysosomal storage disease gene.

### IV. Methods of Using Non-Human Animals Comprising a Reverse-Conditional Null Endogenous Lysosomal Storage Disease Gene

[0216] Various methods are provided for using the non-human animals comprising a reverse-conditional null endogenous lysosomal storage disease gene as described elsewhere herein. Such methods include, e.g., assessing reversibility of a phenotype of the lysosomal storage disease or determining an optimal timeframe for treatment of a phenotype of the lysosomal storage disease.

### A. Methods of Assessing Reversibility of a Lysosomal Storage Disease Phenotype

[0217] Various methods are provided for assessing reversibility of a phenotype of the lysosomal storage disease using non-human animals comprising a reverse-conditional null endogenous lysosomal storage disease gene as described elsewhere herein. Such methods can comprise: (a) treating the non-human animal with the recombinase at a selected time point after birth or treating the non-human animal with a candidate therapeutic agent at the selected time point after birth; and (b) assessing the phenotype of the lysosomal storage disease after a defined time period post-treatment (e.g., relative to a control non-human animal).

[0218] In some methods, step (a) comprises treating the non-human animal with the candidate therapeutic agent at the selected time point after birth. In some methods, step (a) comprises treating the non-human animal with the candidate therapeutic agent at the selected time point after birth but does not comprise treating the non-human animal with the recombinase. In some methods, step (a) comprises treating the non-human animal with the recombinase at the selected time point after birth. In some methods, step (a) comprises treating the non-human animal with the recombinase at the selected time point after birth but does not comprise treating the non-human animal with the candidate therapeutic agent. In some methods, step (a) comprises treating the non-human animal with the recombinase and the candidate therapeutic agent at the selected time point after birth or at separate time points after birth. For example, step (a) can comprise treating the non-human animal with the recombinase at a first time point and treating the non-human animal with the candidate therapeutic agent at a second time point after birth, where the first time point can be before or after the second time point.

[0219] The candidate therapeutic agent can be any candidate therapeutic agent, and the non-human animal can be treated with the candidate therapeutic agent by any suitable means. A candidate therapeutic agent a known therapeutic agent for a lysosomal storage disease (e.g., MPS VI or MPS I) or can be a putative therapeutic agent for a lysosomal storage disease,

[0220] For example, a candidate therapeutic agent can be an antigen-binding protein. The term “antigen-binding protein” includes any protein that binds to an antigen. Examples of antigen-binding proteins include an antibody, an antigen-binding fragment of an antibody, a multispecific antibody (e.g., a bi-specific antibody), an scFV, a bis-scFV, a diabody, a triabody, a tetrabody, a V-NAR, a VHH, a VL, a F(ab), a F(ab)₂, a DVD (dual variable domain antigen-binding protein), an SVD (single variable domain antigen-binding protein), a bispecific T-cell engager (BiTE), or a Davisbody (U.S. Pat. No. 8,586,713, herein incorporated by reference herein in its entirety for all purposes).

[0221] In another example, a candidate therapeutic agent can be a small molecule. Other candidate therapeutic agents can include genome editing reagents such as a nuclease agent (e.g., a Clustered Regularly Interspersed Short Palindromic Repeats (CRISPR)/CRISPR-associated (Cas) (CRISPR/Cas) nuclease, a zinc finger nuclease (ZFN), or a Transcription Activator-Like Effector Nuclease (TALEN)).

[0222] Other candidate therapeutic agents can include RNAi agents. An “RNAi agent” is a composition that comprises a small double-stranded RNA or RNA-like (e.g., chemically modified RNA) oligonucleotide molecule capable of facilitating degradation or inhibition of translation of a target RNA, such as messenger RNA (mRNA), in a sequence-specific manner. The oligonucleotide in the RNAi agent is a polymer of linked nucleosides, each of which can be independently modified or unmodified. RNAi agents operate through the RNA interference mechanism (i.e., inducing RNA interference through interaction with the RNA interference pathway machinery (RNA-induced silencing complex or RISC) of mammalian cells). While it is believed that RNAi agents, as that term is used herein, operate primarily through the RNA interference mechanism, the disclosed RNAi agents are not bound by or limited to any particular pathway or mechanism of action. RNAi agents disclosed herein comprise a sense strand and an antisense strand, and include, but are not limited to, short interfering RNAs (siRNAs), double-stranded RNAs (dsRNA), micro RNAs (miRNAs), short hairpin RNAs (shRNA), and dicer substrates. The antisense strand of the RNAi agents described herein is at least partially complementary to a sequence (i.e., a succession or order of nucleobases or nucleotides, described with a succession of letters using standard nomenclature) in the target RNA.

[0223] Other candidate therapeutic agents can include antisense oligonucleotides (ASOs). Single-stranded ASOs and RNA interference (RNAi) share a fundamental principle in that an oligonucleotide binds a target RNA through Watson-Crick base pairing. Without wishing to be bound by theory, during RNAi, a small RNA duplex (RNAi agent) associates with the RNA-induced silencing complex (RISC), one strand (the passenger strand) is lost, and the remaining strand (the guide strand) cooperates with RISC to bind complementary RNA. Argonaute 2 (Ago2), the catalytic component of the RISC, then cleaves the target RNA. The guide strand is always associated with either the complementary sense strand or a protein (RISC). In contrast, an ASO must survive and function as a single strand. ASOs bind to the target RNA and block ribosomes or other factors, such as splicing factors, from binding the RNA or recruit proteins such as nucleases. Different modifications and target regions are chosen for ASOs based on the desired mechanism of action. A gapmer is an ASO oligonucleotide containing 2-5 chemically modified nucleotides (e.g. LNA or 2′-MOE) on each terminus flanking a central 8-10 base gap of DNA. After binding the target RNA, the DNA-RNA hybrid acts substrate for RNase H.

[0224] Other candidate therapeutic agents include proteins or nucleic acids encoding proteins. In one example, the candidate therapeutic agent is a protein encoded by the endogenous lysosomal storage disease gene or a nucleic acid encoding the protein. In another example, the candidate therapeutic agent is not a protein encoded by the endogenous lysosomal storage disease gene or a nucleic acid encoding the protein.

[0225] The non-human animal can be treated with the recombinase by any possible means. For example, non-human animal can further comprise a genomically integrated recombinase expression cassette encoding the recombinase, wherein the recombinase or the expression cassette is inducible, and step (a) can comprise inducing the recombinase or inducing expression of the recombinase from the inducible genomically integrated recombinase expression cassette. For example, the recombinase coding sequence can be operably linked to an inducible promoter. Expression of the recombinase can also be inducible upon treatment with tamoxifen, and treating the non-human animal with the recombinase in step (a) is treating the non-human animal with tamoxifen to induce the recombinase. The non-human animal can be treated with any suitable number of doses of tamoxifen. The non-human animal can be treated once with tamoxifen or multiple times with tamoxifen. For example, the non-human animal can be treated with about 1 to about 10, about 1 to about 9, about 1 to about 8, about 1 to about 7, about 1 to about 6, about 1 to about 5, about 1 to about 4, about 1 to about 3, about 1 to about 2, about 2 to about 10, about 3 to about 10, about 4 to about 10, about 5 to about 10, about 6 to about 10, about 7 to about 10, about 8 to about 10, about 9 to about 10, about 2 to about 8, about 3 to about 7, about 4 to about 6, or about 5 tamoxifen doses. If multiple doses of tamoxifen are given, they can be separated by any suitable amount of time. For example, the tamoxifen doses can be about every 12 hours, daily, every 2 days, or every 3 days. In a specific example, 5 daily tamoxifen doses are given. The non-human animal can be treated with any suitable concentration of tamoxifen. For example, the tamoxifen dose(s) can be about 0.25 to about 5, about 0.25 to about 4.5, about 0.25 to about 4, about 0.25 to about 3.5, about 0.25 to about 3, about 0.25 to about 2.5, about 0.25 to about 2, about 0.25 to about 1.5, about 0.25 to about 1, about 0.5 to about 5, about 0.75 to about 5, about 1 to about 5, about 1.5 to about 5, about 2 to about 5, about 2.5 to about 5, about 3 to about 5, about 3.5 to about 5, about 4 to about 5, about 4.5 to about 5, about 0.5 to about 4, about 0.75 to about 3, about 1 to about 3, about 1 to about 4, about 1 to about 5, about 1 to about 2, about 1, or about 2 mg per 25 g body weight. In one specific example, the dose of tamoxifen is about 1 mg per 25 g body weight (e.g., at P7). In another specific example, the dose of tamoxifen is about 2 mg per 25 g body weight (e.g., at P21 or at about 8 weeks after birth). A specific example is a tamoxifen-inducible Cre recombinase, which can utilize a tamoxifen inducible Cre-estrogen receptor (ER) fusion protein. Cre is fused with the ligand-binding domain of a mutated ligand-binding domain of ER, which does not bind to estrogen but binds to tamoxifen with high affinity. Cre-ER proteins are sequestered in the cytoplasm via association with the HSP90 chaperone. Upon addition of tamoxifen, tamoxifen-bound Cre-ER dissociates from HSP90, translocates into the nucleus, and carries out site-specific recombination between flanking lox sites. In a specific example, the Cre recombinase is Cre-ER^{T2}, in which additional mutations have been engineered into the ER ligand-binding domain to bind tamoxifen with a higher affinity.

[0226] In another example, the non-human animal can further comprise a genomically integrated recombinase expression cassette encoding the recombinase, wherein the recombinase coding sequence is operably linked to a tissue-specific promoter, wherein the recombinase is expressed from the promoter in a tissue-specific manner.

[0227] In another example, the non-human animal can further comprise a genomically integrated recombinase expression cassette encoding the recombinase, wherein the recombinase coding sequence is operably linked to a developmentally regulated promoter, wherein the recombinase is expressed from the promoter at a particular developmental stage.

[0228] In other examples, the non-human animal can be administered the recombinase in protein form or in the form of a nucleic acid encoding the recombinase. The recombinase or other reagents (e.g., tamoxifen or candidate therapeutic agents) can be administered by any delivery method (e.g., AAV, LNP, HDD, or injection) and by any route of administration. Administering or introducing includes presenting to the cell or non-human animal the reagents (e.g., nucleic acid or protein) in such a manner that it gains access to the interior of the cell or to the interior of cells within the non-human animal.

[0229] Recombinases can be provided in any form. For example, a recombinase can be provided in the form of a protein. Alternatively, a recombinase can be provided in the form of a nucleic acid encoding the recombinase, such as an RNA (e.g., messenger RNA (mRNA)) or DNA. Optionally, the nucleic acid encoding the recombinase can be codon optimized for efficient translation into protein in a particular cell or organism. For example, the nucleic acid encoding the recombinase can be modified to substitute codons having a higher frequency of usage in a mammalian cell, a rodent cell, a mouse cell, a rat cell, or any other host cell of interest, as compared to the naturally occurring polynucleotide sequence. When a nucleic acid encoding the recombinase is introduced into a non-human animal, the recombinase can be transiently, conditionally, or constitutively expressed in a cell in the non-human animal.

[0230] Nucleic acids encoding recombinases can be operably linked to a promoter in an expression construct. Expression constructs include any nucleic acid constructs capable of directing expression of a gene or other nucleic acid sequence of interest (e.g., a recombinase) and which can transfer such a nucleic acid sequence of interest to a target cell. Suitable promoters that can be used can be, for example, conditional promoters, inducible promoters, constitutive promoters, or tissue-specific promoters.

[0231] Various methods and compositions are provided herein to allow for introduction of reagents (e.g., a nucleic acid or protein) into a cell or non-human animal. Methods for introducing reagents into various cell types are known and include, for example, stable transfection methods, transient transfection methods, and virus-mediated methods.

[0232] Transfection protocols as well as protocols for introducing reagents into cells may vary. Non-limiting transfection methods include chemical-based transfection methods using liposomes; nanoparticles; calcium phosphate (Graham et al. (1973) Virology 52 (2): 456-67, Bacchetti et al. (1977)Proc. Natl. Acad. Sci. U.S.A. 74 (4): 1590-4, and Kriegler, M (1991). Transfer and Expression: A Laboratory Manual. New York: W. H. Freeman and Company. pp. 96-97); dendrimers; or cationic polymers such as DEAE-dextran or polyethylenimine. Non-chemical methods include electroporation, sonoporation, and optical transfection. Particle-based transfection includes the use of a gene gun, or magnet-assisted transfection (Bertram (2006) Current Pharmaceutical Biotechnology 7, 277-28). Viral methods can also be used for transfection.

[0233] Introduction of reagents (e.g., nucleic acids or proteins) into a cell can also be mediated by electroporation, by intracytoplasmic injection, by viral infection, by adenovirus, by adeno-associated virus, by lentivirus, by retrovirus, by transfection, by lipid-mediated transfection, or by nucleofection. Nucleofection is an improved electroporation technology that enables nucleic acid substrates to be delivered not only to the cytoplasm but also through the nuclear membrane and into the nucleus. In addition, use of nucleofection in the methods disclosed herein typically requires much fewer cells than regular electroporation (e.g., only about 2 million compared with 7 million by regular electroporation). In one example, nucleofection is performed using the LONZA® NUCLEOFECTOR™ system.

[0234] Introduction of reagents (e.g., nucleic acids or proteins) into a cell (e.g., a zygote) can also be accomplished by microinjection. In zygotes (i.e., one-cell stage embryos), microinjection can be into the maternal and/or paternal pronucleus or into the cytoplasm. If the microinjection is into only one pronucleus, the paternal pronucleus is preferable due to its larger size. Microinjection of an mRNA is preferably into the cytoplasm (e.g., to deliver mRNA directly to the translation machinery), while microinjection of protein or a polynucleotide encoding a protein is preferable into the nucleus/pronucleus. Alternatively, microinjection can be carried out by injection into both the nucleus/pronucleus and the cytoplasm: a needle can first be introduced into the nucleus/pronucleus and a first amount can be injected, and while removing the needle from the one-cell stage embryo a second amount can be injected into the cytoplasm. Methods for carrying out microinjection are well known. See, e.g., Nagy et al. (Nagy A, Gertsenstein M, Vintersten K, Behringer R., 2003, Manipulating the Mouse Embryo. Cold Spring Harbor, New York: Cold Spring Harbor Laboratory Press); see also Meyer et al. (2010) Proc. Natl. Acad. Sci. U.S.A. 107:15022-15026 and Meyer et al. (2012) Proc. Natl. Acad. Sci. U.S.A. 109:9354-9359.

[0235] Other methods for introducing reagents (e.g., nucleic acid or proteins) into a cell or non-human animal can include, for example, vector delivery, particle-mediated delivery, exosome-mediated delivery, lipid-nanoparticle-mediated delivery, cell-penetrating-peptide-mediated delivery, or implantable-device-mediated delivery. As specific examples, a nucleic acid or protein can be introduced into a cell or non-human animal in a carrier such as a poly(lactic acid) (PLA) microsphere, a poly(D,L-lactic-coglycolic-acid) (PLGA) microsphere, a liposome, a micelle, an inverse micelle, a lipid cochleate, or a lipid microtubule. Some specific examples of delivery to a non-human animal include hydrodynamic delivery, virus-mediated delivery (e.g., adeno-associated virus (AAV)-mediated delivery), and lipid-nanoparticle-mediated delivery.

[0236] Introduction of reagents (e.g., nucleic acids and proteins) into cells or non-human animals can be accomplished by hydrodynamic delivery (HDD). For gene delivery to parenchymal cells, only essential DNA sequences need to be injected via a selected blood vessel, eliminating safety concerns associated with current viral and synthetic vectors. When injected into the bloodstream, DNA is capable of reaching cells in the different tissues accessible to the blood. Hydrodynamic delivery employs the force generated by the rapid injection of a large volume of solution into the incompressible blood in the circulation to overcome the physical barriers of endothelium and cell membranes that prevent large and membrane-impermeable compounds from entering parenchymal cells. In addition to the delivery of DNA, this method is useful for the efficient intracellular delivery of RNA, proteins, and other small compounds in vivo. See, e.g., Bonamassa et al. (2011) Pharm. Res. 28(4):694-701, herein incorporated by reference in its entirety for all purposes.

[0237] Introduction of nucleic acids can also be accomplished by virus-mediated delivery, such as AAV-mediated delivery or lentivirus-mediated delivery. Other exemplary viruses/viral vectors include retroviruses, adenoviruses, vaccinia viruses, poxviruses, and herpes simplex viruses. The viruses can infect dividing cells, non-dividing cells, or both dividing and non-dividing cells. The viruses can integrate into the host genome or alternatively do not integrate into the host genome. Such viruses can also be engineered to have reduced immunity. The viruses can be replication-competent or can be replication-defective (e.g., defective in one or more genes necessary for additional rounds of virion replication and/or packaging). Exemplary viral titers (e.g., AAV titers) include about 10¹², about 10¹³, about 10¹⁴, about 10¹⁵, and about 10¹⁶ vector genomes/mL. Other exemplary viral titers (e.g., AAV titers) include about 10¹², about 10¹³, about 10¹⁴, about 105, and about 10¹⁶ vector genomes (vg)/kg of body weight.

[0238] Introduction of nucleic acids and proteins can also be accomplished by lipid nanoparticle (LNP)-mediated delivery. Lipid formulations can protect biological molecules from degradation while improving their cellular uptake. Lipid nanoparticles are particles comprising a plurality of lipid molecules physically associated with each other by intermolecular forces. These include microspheres (including unilamellar and multilamellar vesicles, e.g., liposomes), a dispersed phase in an emulsion, micelles, or an internal phase in a suspension. Such lipid nanoparticles can be used to encapsulate one or more nucleic acids or proteins for delivery. Formulations which contain cationic lipids are useful for delivering polyanions such as nucleic acids. Other lipids that can be included are neutral lipids (i.e., uncharged or zwitterionic lipids), anionic lipids, helper lipids that enhance transfection, and stealth lipids that increase the length of time for which nanoparticles can exist in vivo. An exemplary lipid nanoparticle can comprise a cationic lipid and one or more other components. In one example, the other component can comprise a helper lipid such as cholesterol. In another example, the other components can comprise a helper lipid such as cholesterol and a neutral lipid such as DSPC. In another example, the other components can comprise a helper lipid such as cholesterol, an optional neutral lipid such as DSPC, and a stealth lipid such as S010, S024, S027, S031, or S033.

[0239] The LNP may contain one or more or all of the following: (i) a lipid for encapsulation and for endosomal escape; (ii) a neutral lipid for stabilization; (iii) a helper lipid for stabilization; and (iv) a stealth lipid.

[0240] Administration in vivo can be by any suitable route including, for example, parenteral, intravenous, oral, subcutaneous, intra-arterial, intracranial, intrathecal, intraperitoneal, topical, intranasal, or intramuscular. Systemic modes of administration include, for example, oral and parenteral routes. Examples of parenteral routes include intravenous, intraarterial, intraosseous, intramuscular, intradermal, subcutaneous, intranasal, and intraperitoneal routes. A specific example is intravenous infusion. Nasal instillation and intravitreal injection are other specific examples. Local modes of administration include, for example, intrathecal, intracerebroventricular, intraparenchymal (e.g., localized intraparenchymal delivery to the striatum (e.g., into the caudate or into the putamen), cerebral cortex, precentral gyrus, hippocampus (e.g., into the dentate gyrus or CA3 region), temporal cortex, amygdala, frontal cortex, thalamus, cerebellum, medulla, hypothalamus, tectum, tegmentum, or substantia nigra), intraocular, intraorbital, subconjuctival, intravitreal, subretinal, and transscleral routes. Significantly smaller amounts of the components (compared with systemic approaches) may exert an effect when administered locally (for example, intraparenchymal or intravitreal) compared to when administered systemically (for example, intravenously). Local modes of administration may also reduce or eliminate the incidence of potentially toxic side effects that may occur when therapeutically effective amounts of a component are administered systemically.

[0241] Administration in vivo can be by any suitable route including, for example, parenteral, intravenous, oral, subcutaneous, intra-arterial, intracranial, intrathecal, intraperitoneal, topical, intranasal, or intramuscular. A specific example is intravenous infusion. Compositions can be formulated using one or more physiologically and pharmaceutically acceptable carriers, diluents, excipients or auxiliaries. The formulation can depend on the route of administration chosen. The term “pharmaceutically acceptable” means that the carrier, diluent, excipient, or auxiliary is compatible with the other ingredients of the formulation and not substantially deleterious to the recipient thereof.

[0242] The frequency of administration and the number of dosages can depend on the half-life of the delivered proteins or nucleic acids and the route of administration among other factors. The introduction of nucleic acids or proteins into the cell or non-human animal can be performed one time or multiple times over a period of time. For example, the introduction can be performed at least two times over a period of time, at least three times over a period of time, at least four times over a period of time, at least five times over a period of time, at least six times over a period of time, at least seven times over a period of time, at least eight times over a period of time, at least nine times over a period of times, at least ten times over a period of time, at least eleven times, at least twelve times over a period of time, at least thirteen times over a period of time, at least fourteen times over a period of time, at least fifteen times over a period of time, at least sixteen times over a period of time, at least seventeen times over a period of time, at least eighteen times over a period of time, at least nineteen times over a period of time, or at least twenty times over a period of time.

[0243] The control non-human animal in the above methods can be the non-human animal prior to treatment with the recombinase. Alternatively, the control non-human animal can be a second non-human animal comprising the reverse-conditional null endogenous lysosomal storage disease gene, wherein the second non-human animal has not been treated with the recombinase. For example, the second non-human animal can be the same age as the non-human animal treated with the recombinase.

[0244] The control non-human animal in the above methods can be the non-human animal prior to treatment with the candidate therapeutic agent. Alternatively, the control non-human animal can be a second non-human animal comprising the reverse-conditional null endogenous lysosomal storage disease gene, wherein the second non-human animal has not been treated with the candidate therapeutic agent. For example, the second non-human animal can be the same age as the non-human animal treated with the candidate therapeutic agent.

[0245] In some methods, step (b) can further comprise the phenotype of the lysosomal storage disease after a defined time period post-treatment relative to a wild type non-human animal. In one example, the wild type non-human animal is the same age as the non-human animal in step (a). In one example, the wild type non-human animal is the same age as the non-human animal in step (b).

[0246] The selected time point after birth can be any suitable time point. For example, the selected time point after birth can be about postnatal day 1 (P1), about P2, about P3, about P4, about P5, about P6, about P7, about P14, about P21, about P28, about 1 month after birth, about 2 months after birth, about 3 months after birth, about 4 months after birth, about 5 months after birth, about 6 months after birth, about 7 months after birth, about 8 months after birth, about 9 months after birth, about 10 months after birth, about 11 months after birth, about 1 year after birth, or later. In a specific example, the selected time point is about P7. In another specific example, the selected time point is about P21. In another specific example, the selected time point is about 2 months after birth.

[0247] Likewise, the defined time period post-treatment can be any suitable time period. For example, it can be at least about 1 week, at least about 2 weeks, at least about 3 weeks, at least about 4 weeks, at least about 1 month, at least about 2 months, at least about 3 months, at least about 4 months, at least about 5 months, at least about 6 months, at least about 7 months, at least about 8 months, at least about 9 months, at least about 10 months, at least about 11 months, at least about 1 year, or more after treatment with the recombinase. In a specific example, the defined time period post-treatment is at least about 1 week. In another specific example, the defined time period post-treatment is at least about 1 month. In another specific example, the defined time period post-treatment is at least about 3 months. In another specific example, the defined time period post-treatment is between about 1 month and about 3 months after treatment. In another specific example, the defined time period post-treatment is between about 1 week and about 3 months after treatment.

[0248] The lysosomal storage disease phenotype can be any lysosomal storage disease phenotype. Examples of such phenotypes are disclosed elsewhere herein and can be assessed by known methods. In a specific example, the lysosomal storage disease is a mucopolysaccharidosis (i.e., the lysosomal storage disease gene is a mucopolysaccharidosis gene), and the phenotype is a mucopolysaccharidosis phenotype. Examples of such phenotypes are disclosed elsewhere herein and can be assessed by known methods.

[0249] In one example, the lysosomal storage disease is mucopolysaccharidosis VI (i.e., the lysosomal storage disease gene is Arsb), and the phenotype is a mucopolysaccharidosis VI phenotype. For example, the phenotype can be a skeletal mucopolysaccharidosis VI phenotype. Examples of such phenotypes are disclosed elsewhere herein and can be assessed by known methods as demonstrated herein. For example, the phenotype can be one of the following relative to a wild type non-human animal: (a) increased accumulation of glycosaminoglycans in the liver; (b) increased accumulation of glycosaminoglycans in the heart; (c) increased accumulation of glycosaminoglycans in the kidney; (d) decreased tibia length; (e) decreased spinal column length; (f) increased tibial growth plate width; and (g) decreased cranial length:width ratio. In one example, the phenotype is increased accumulation of glycosaminoglycans in the liver. In another example, the phenotype is increased accumulation of glycosaminoglycans in the heart. In another example, the phenotype is increased accumulation of glycosaminoglycans in the kidney. In another example, the phenotype is decreased tibia length. In another example, the phenotype is decreased spinal column length. In another example, the phenotype is increased tibial growth plate width. In another example, the phenotype is decreased cranial length:width ratio.

[0250] In another example, the lysosomal storage disease is mucopolysaccharidosis I (i.e., the lysosomal storage disease gene is Idua), and the phenotype is a mucopolysaccharidosis I phenotype. Examples of such phenotypes are disclosed elsewhere herein and can be assessed by known methods as demonstrated herein. For example, the phenotype can be a skeletal mucopolysaccharidosis I phenotype or a neurological mucopolysaccharidosis I phenotype. In one example, the phenotype is a skeletal mucopolysaccharidosis I phenotype. In one example, the phenotype is a neurological mucopolysaccharidosis I phenotype.

### B. Methods of Determining Optimal Timeframe for Treatment of a Lysosomal Storage Disease Phenotype

[0251] Various methods are provided for determining an optimal timeframe for treatment of a phenotype of the lysosomal storage disease. Such methods can comprise, for example: (a) performing the method of assessing reversibility of a phenotype of the lysosomal storage disease as described above a first time in a first non-human animal comprising a reverse-conditional null endogenous lysosomal storage disease gene, wherein the first non-human animal is treated with the recombinase at a first time point after birth; (b) performing the method of step (a) a second time in a second non-human animal, wherein the second non-human animal is treated with the recombinase at a second time point after birth, wherein the second time point is different from the first time point; and (c) comparing the phenotype in step (a) with the phenotype in step (b) and selecting the time point resulting in the better amelioration of the phenotype.

[0252] A phenotype is better ameliorated if the lysosomal storage disease phenotype (e.g., mucopolysaccharidosis phenotype, MIPS VI phenotype, or MIPS I phenotype) is closer to normal (i.e., wild type phenotype). For example, complete rescue of a phenotype (i.e., to wild type levels) is better amelioration of the phenotype than a partial rescue of the phenotype.

[0253] The first and second time points after birth can be any suitable time points as described above. In a specific example, the first time point is about postnatal day 7 (P7), and the second time point is about P21. In another specific example, the first time point is about P7, and the second time point is about 2 months after birth. In another specific example, the first time point is about P21, and the second time point is about 2 months after birth. Preferably, the defined time period post-treatment is the same in steps (a) and (b). Examples of suitable time periods post-treatment are disclosed above. In a specific example, the defined time period post-treatment in both steps (a) and (b) is at least about 1 week. In another specific example, the defined time period post-treatment in both steps (a) and (b) is at least about 1 month. In another specific example, the defined time period post-treatment in both steps (a) and (b) is at least about 3 months. In another specific example, the defined time period post-treatment in both steps (a) and (b) is between about 1 month and about 3 months after treatment. In another specific example, the defined time period post-treatment in both steps (a) and (b) is between about 1 week and about 3 months after treatment.

### C. Methods of Assessing Reversibility of a Lysosomal Storage Disease Phenotype by a Combination Therapy

[0254] Various methods are provided for assessing the reversibility of a phenotype of a lysosomal storage disease by a combination therapy. Such methods can comprise, for example: (a) performing the method of assessing reversibility of a phenotype of the lysosomal storage disease as described above in a first non-human animal comprising a reverse-conditional null endogenous lysosomal storage disease gene and in a second non-human animal comprising a reverse-conditional null endogenous lysosomal storage disease gene, wherein the first non-human animal is treated with the recombinase but not the candidate therapeutic agent, and wherein the second non-human animal is treated with the recombinase and the candidate therapeutic agent; (b) comparing the phenotype in the first non-human animal with the phenotype in the second non-human animal to determine if the combination of the recombinase and the candidate therapeutic agent results in better amelioration of the phenotype.

[0255] A phenotype is better ameliorated if the lysosomal storage disease phenotype (e.g., mucopolysaccharidosis phenotype, MIPS VI phenotype, or MIPS I phenotype) is closer to normal (i.e., wild type phenotype). For example, complete rescue of a phenotype (i.e., to wild type levels) is better amelioration of the phenotype than a partial rescue of the phenotype.

[0256] In some methods, the first non-human animal and the second non-human animal are treated with the recombinase at the same time point after birth. In some methods, the second non-human animal is treated with the recombinase and the candidate therapeutic agent simultaneously. In some methods, the second non-human animal is treated with the recombinase and the candidate therapeutic agent sequentially. For example, the second non-human animal can be treated with the recombinase first and then subsequently with the candidate therapeutic agent, or the second non-human animal can be treated with the candidate therapeutic agent first and then subsequently with the recombinase.

[0257] The candidate therapeutic agent can be any suitable candidate therapeutic agent as described above. In some methods, the candidate therapeutic agent is not a protein encoded by the endogenous lysosomal storage disease gene or a nucleic acid encoding the protein.

### D. Methods of Assessing Efficacy of a Candidate Therapeutic Agent for Treating a Lysosomal Storage Disease

[0258] Various methods are provided for assessing the efficacy of a therapeutic agent for reversing a phenotype of a lysosomal storage disease. Such methods can comprise, for example: (a) performing the method of assessing reversibility of a phenotype of the lysosomal storage disease as described above in a first non-human animal comprising a reverse-conditional null endogenous lysosomal storage disease gene and in a second non-human animal comprising a reverse-conditional null endogenous lysosomal storage disease gene, wherein the first non-human animal is treated with the recombinase but not the candidate therapeutic agent, and wherein the second non-human animal is treated with the candidate therapeutic agent but not the recombinase; (b) comparing the phenotype in the first non-human animal with the phenotype in the second non-human animal to determine if the recombinase results in better amelioration of the phenotype than the candidate therapeutic agent. Such methods can be used to determine the efficacy of the candidate therapeutic agent relative to the maximal effect achieved by turning back on the lysosomal storage disease gene through treating with the recombinase.

[0259] A phenotype is better ameliorated if the lysosomal storage disease phenotype (e.g., mucopolysaccharidosis phenotype, MIPS VI phenotype, or MIPS I phenotype) is closer to normal (i.e., wild type phenotype). For example, complete rescue of a phenotype (i.e., to wild type levels) is better amelioration of the phenotype than a partial rescue of the phenotype.

[0260] In some methods, the recombinase and the candidate therapeutic agent are administered at the same selected time point after birth. In some methods, the phenotype is assessed after the same defined time period post-treatment in the first non-human animal and the second non-human animal. In some methods, the recombinase and the candidate therapeutic agent are administered at the same selected time point after birth, and the phenotype is assessed after the same defined time period post-treatment in the first non-human animal and the second non-human animal.

[0261] The candidate therapeutic agent can be any suitable candidate therapeutic agent as described above. In some methods, the candidate therapeutic agent is a protein encoded by the endogenous lysosomal storage disease gene or a nucleic acid encoding the protein.

[0262] All patent filings, websites, other publications, accession numbers and the like cited above or below are incorporated by reference in their entirety for all purposes to the same extent as if each individual item were specifically and individually indicated to be so incorporated by reference. If different versions of a sequence are associated with an accession number at different times, the version associated with the accession number at the effective filing date of this application is meant. The effective filing date means the earlier of the actual filing date or filing date of a priority application referring to the accession number if applicable. Likewise, if different versions of a publication, website or the like are published at different times, the version most recently published at the effective filing date of the application is meant unless otherwise indicated. Any feature, step, element, embodiment, or aspect of the invention can be used in combination with any other unless specifically indicated otherwise. Although the present invention has been described in some detail by way of illustration and example for purposes of clarity and understanding, it will be apparent that certain changes and modifications may be practiced within the scope of the appended claims.

### BRIEF DESCRIPTION OF THE SEQUENCES

[0263] The nucleotide and amino acid sequences listed in the accompanying sequence listing are shown using standard letter abbreviations for nucleotide bases, and three-letter code for amino acids. The nucleotide sequences follow the standard convention of beginning at the 5′ end of the sequence and proceeding forward (i.e., from left to right in each line) to the 3′ end. Only one strand of each nucleotide sequence is shown, but the complementary strand is understood to be included by any reference to the displayed strand. When a nucleotide sequence encoding an amino acid sequence is provided, it is understood that codon degenerate variants thereof that encode the same amino acid sequence are also provided. The amino acid sequences follow the standard convention of beginning at the amino terminus of the sequence and proceeding forward (i.e., from left to right in each line) to the carboxy terminus.

TABLE 4
Description of Sequences.

| SEQ | | |
|---|---|---|
| ID NO | Type | Description |
| 1 | Protein | mARSB (NP_033842.3) |
| 2 | DNA | mArsb cDNA (NM_009712.3) |
| 3 | DNA | mArsb CDS (CCDS36749.1) |
| 4 | Protein | mIDUA (NP_032351.2) |
| 5 | DNA | mIdua cDNA (NM_008325.4) |
| 6 | DNA | mIdua CDS |
| 7 | DNA | MAID8378 (mArsb OFF with |
| | | Neo Self Deleting Cassette) |
| 8 | DNA | MAID8379 (mArsb OFF without |
| | | Neo Self Deleting Cassette) |
| 9 | DNA | MAID8380 (mArsb ON without |
| | | Neo Self Deleting Cassette) |
| 10 | DNA | MAID8375 (mIdua OFF with |
| | | Neo Self Deleting Cassette) |
| 11 | DNA | MAID8376 (mIdua OFF without |
| | | Neo Self Deleting Cassette) |
| 12 | DNA | MAID8377 (mIdua ON, post Cre, |
| | | without Neo Self Deleting Cassette) |
| 13-30 | DNA | Primers and Probes for mArsb Screening |
| 31-46 | DNA | Primers and Probes for mIdua Screening |
| 47 | DNA | Inverted mArsb Sequence |
| 48 | DNA | Reinverted mArsb Sequence |
| 49 | DNA | Inverted mIdua Sequence |
| 50 | DNA | Reinverted mIdua Sequence |
| 51-58 | DNA | Primers and Probes |

### EXAMPLES

### Example 1. Generation of a COIN Mouse Model of Mucopolysaccharidosis VI

[0264] Mucopolysaccharidosis VI (MPS VI), also known as Maroteaux-Lamy Syndrome, is a lysosomal disease resulting from impaired function of the arylsulfatase B (ARSB) protein. This impairment causes aberrant accumulation of dermatan sulfate, a glycosaminoglycan (GAG) abundant in growth plates, cartilage, and extracellular matrix. While clinical presentation is variable in terms of age at first symptom manifestation and disease severity, MPS VI classically presents at early ages and significantly impacts the skeleton. Current treatment guidelines recommend enzyme replacement therapy (ERT), which is known to provide incomplete or ineffective recovery from the skeletal manifestations of disease. We can postulate this may be due to the inability of the exogenous enzyme to reach affected cells, or that disease may not be reversible at the time therapy is delivered. To date, no models of disease exist that separate treatment efficacy from disease reversibility. To date, no model exists where efficacy of ERT and reversibility of the phenotype can be explored independently.

[0265] To this end, we have generated a “conditional-on” mouse model of MPS VI, using a Rosa Cre-ERT2 plus floxed-inversion approach (COIN) (i.e., a conditional by inversion (COIN) mouse model of MPS VI, Arsb^{COIN/COIN}). In this design, ARSB expression is initially “off” due to the inversion of exon 5 in the Arsb gene. In order to restore ARSB expression at different times during postnatal development, we introduced a tamoxifen-dependent global Cre driver, Gt(ROSA26)Sor^{CreERt2/+}. After tamoxifen administration, exon 5 is restored to its native orientation, enabling ARSB expression. This approach allows us to restore endogenous expression of the missing enzyme starting at different points during disease progression, and therefore define the window of reversibility. This approach allowed us to turn back “on” endogenous expression of the missing enzyme at several points during disease progression. Probing gene rescue in adult mice, at age P21, and at age P7, we have determined that the skeletal phenotype can be rescued at with intervention at P7, but efficacy declines with further age. By restoring Arsb expression at postnatal days 7, 21, and 56-70 (P7, P21, and P56-P70), we determined long bone length and other skeletal phenotypes can be fully rescued if gene restoration occurs at P7, while only partial rescue occurs with later interventions.

[0266] A large targeting vector (LTVEC) comprising a 5′ homology arm comprising 81 kb of the mouse Arsb locus and 3′ homology arm comprising 102 kb of the mouse Arsb locus was generated to replace a region surrounding exon 5 with a corresponding inverted region flanked by a 5′ lox71 site and a 3′ lox66. A roxed self-deleting cassette was inserted downstream of the inverted sequence. Information on the mouse Arsb gene is provided in Table 5. A description of the generation of the large targeting vector is provided in Table 6. Generation and use of large targeting vectors (LTVECs) derived from bacterial artificial chromosome (BAC) DNA through bacterial homologous recombination (BHR) reactions using VELOCIGENE® genetic engineering technology is described, e.g., in U.S. Pat. No. 6,586,251 and Valenzuela et al. (2003) Nat. Biotechnol. 21(6):652-659, each of which is herein incorporated by reference in its entirety for all purposes. Generation of LTVECs through in vitro assembly methods is described, e.g., in US 2015/0376628 and WO 2015/200334, each of which is herein incorporated by reference in its entirety for all purposes.

TABLE 5
Mouse Arsb.

| | Gene | | RefSeq | | Genomic | |
|---|---|---|---|---|---|---|
| | Symbol | NCBI Gene ID | mRNA ID | UniProt ID | Assembly | Chromosomal Location |
| Mouse | Arsb | 11881 | NM_009712 | P50429 | GRCm38/ | chr13:93,771,630- |
| | | | | | mm10 | 93,943,016 (+) |

TABLE 6
Mouse Arsb Large Targeting Vector.

| | | | | Length |
|---|---|---|---|---|
| | Genome Build | Start | End | (bp) |
| 5′ Mouse Arm | GRCm38/mm10 | chr13: | chr13: | 81168 |
| | | 93,780,418 | 93,861,585 | |
| Human Insert | GRCm38/mm10 | chr13: | chr13: | 1127 |
| | | 93,861,605 | 93,862,731 | |
| 3′ Mouse Arm | GRCm38/mm10 | chr13: | chr13: | 101980 |
| | | 93,862,755 | 93,964,734 | |

[0267] Specifically, a region surrounding exon 5 (coding exon 5; amino acids 301-382) of the Arsb gene, including 482 bps of the 5′ intron and 401 bps of the 3′ intron, was inverted in the mouse Arsb locus. A 19 bp deletion immediately 5′ and a 23 bp deletion immediately 3′ of this region were incorporated to facilitate screening in mouse embryonic stem cells. The inverted region (SEQ ID NO: 47) is flanked by a 5′ lox71 site and a 3′ lox66. A roxed self-deleting cassette was inserted 3′ of the inverted region. This is the MAID 8378 allele (SEQ ID NO: 7). The allele after cassette deletion is the MAID 8379 allele (SEQ ID NO: 8). The cassette-deleted allele after rescue by inversion of the inverted exon 5 region (reinverted region set forth in SEQ ID NO: 48) is the MAID 8380 allele (SEQ ID NO: 9). See FIG. 1.

[0268] The expected encoded ARSB protein after rescue by inversion of the inverted exon 5 region is a fully mouse ARSB protein. See FIG. 1. The mouse ARSB protein and Arsb coding sequences are set forth in SEQ ID NOS: 1 and 3, respectively.

[0269] To generate the mutant allele a large targeting vector was introduced into mouse embryonic stem cells. Specifically, 2×10⁶ mouse VGF1 embryonic cells (50% C57BL/6NTac 50% 129S6/SvEvTac) carrying a Rosa26-CreER^{T2} allele were electroporated with 0.4 μg mArsb LTVEC. The electroporation conditions were: 400 V voltage; 100 mF capacitance; and 0 W resistance. Antibiotic selection was performed using G418 at a concentration of 100 mg/mL. Colonies were picked, expanded, and screened by TAQMAN®. See FIG. 2. Loss-of-allele assays were performed to detect loss of the endogenous mouse allele, and gain-of-allele assays were performed using the primers and probes set forth in Table 7. The GOA2 gain-of-allele assays was used to detect the mArsb gene inversion, after tamoxifen-Cre activation, using the primers and probes set forth in Table 7.

TABLE 7
Screening Assays.

| | | | | SEQ |
|---|---|---|---|---|
| | | | | ID |
| Assay | Description | Primer/Probe | Sequence | NO |
| 8378mTU | Upstream | Fwd | TGAAGCAATAACCCTTGACCTAAA | 13 |
| | LOA | Probe (FAM) | TGAGAAGCAGGAACAGCACTAGGCC | 14 |
| | | Rev | TGCCAGGACGTCTATCCAA | 15 |
| 8378mTD | Downstream | Fwd | AATGTCTGTGGTTCGGTACCTAG | 16 |
| | LOA | Probe (Cal-Orange) | TCACATGTACTGGAAGCAAATGACTATTGC | 17 |
| | | Rev | GCACACCAAAGAGGCTGAAAG | 18 |
| 8378GOA | GOA1- | Fwd | AGGCCAAGATTGACAGTTACCAG | 19 |
| | Upstream | Probe (FAM) | ATGCAGAAACTCGAGGGATCTCCTACC | 20 |
| | Insertion | Rev | GGAGTACAGGGAAGGAAACCT | 21 |
| 2154MUP | GOA2- | Fwd | CCAGCCAGAATTTATATGCAGAAA | 22 |
| | Cre | Probe (Cal) | CTCGAGGGATCTCC | 23 |
| | Activation | Rev | CAGTCATAGCTGTCCCTCTTCTCTT | 24 |
| DreU | Selection | Fwd | GCCTCCGCTGTCTGACGAT | 25 |
| | Cassette | Probe (FAM) | AAGTCTGTGTCCCTTGCCATGCG | 26 |
| | Assay | Rev | GCTGCCTCCCGTCTGATTC | 27 |
| Neo | Selection | Fwd | GGTGGAGAGGCTATTCGGC | 28 |
| | Cassette | Probe (Cal) | TGGGCACAACAGACAATCGGCTG | 29 |
| | Assay | Rev | GAACACGGCGGCATCAG | 30 |

[0270] Modification-of-allele (MOA) assays including loss-of-allele (LOA) and gain-of-allele (GOA) assays are described, for example, in US 2014/0178879; US 2016/0145646; WO 2016/081923; and Frendewey et al. (2010) Methods Enzymol. 476:295-307, each of which is herein incorporated by reference in its entirety for all purposes. The loss-of-allele (LOA) assay inverts the conventional screening logic and quantifies the number of copies in a genomic DNA sample of the native locus to which the mutation was directed. In a correctly targeted heterozygous cell clone, the LOA assay detects one of the two native alleles (for genes not on the X or Y chromosome), the other allele being disrupted by the targeted modification. The same principle can be applied in reverse as a gain-of-allele (GOA) assay to quantify the copy number of the inserted targeting vector in a genomic DNA sample.

[0271] F0 mice were generated from the modified ES cells using the VELOCIMOUSE® method. Specifically, mouse ES cell clones comprising the modified Arsb locus described above that were selected by the MOA assay described above were injected into 8-cell stage embryos using the VELOCIMOUSE® method. See, e.g., U.S. Pat. Nos. 7,576,259; 7,659,442; 7,294,754; US 2008/0078000; and Poueymirou et al. (2007) Nat. Biotechnol. 25(1):91-99, each of which is herein incorporated by reference in its entirety for all purposes. In the VELOCIMOUSE® method, targeted mouse ES cells are injected through laser-assisted injection into pre-morula stage embryos, e.g., eight-cell-stage embryos, which efficiently yields F0 generation mice that are fully ES-cell-derived. In the VELOCIMOUSE® method, the injected pre-morula stage embryos are cultured to the blastocyst stage, and the blastocyst-stage embryos are introduced into and gestated in surrogate mothers to produce the F0 generation mice. When starting with mouse ES cell clones homozygous for the targeted modification, F0 mice homozygous for the targeted modification are produced. When starting with mouse ES cell clones heterozygous for the targeted modification, subsequent breeding can be performed to produce mice homozygous for the targeted modification.

### Example 2. Use of COIN Model in MPS VI to Define Phenotype Reversibility

[0272] The mouse model generated in Example 1 allows restoration of Arsb expression from the native locus at desired timepoints, bypassing the limitations of enzyme replacement therapy (ERT). In the absence of tamoxifen, ARSB production is “off,” replicating the Arsb knockout phenotype, because the region surrounding exon 5 is inverted. In the presence of tamoxifen, expression of Cre recombinase is induced, and the Cre recombinase inverts the inverted exon 5 region, flipping it back into the correct orientation, restoring wild type Arsb expression. See FIG. 9.

[0273] The COIN Arsb mice were first assessed in the absence of tamoxifen to assess whether they display key features of MPS VI. COIN Arsb mice were examined alongside an age and sex matched wild type (WT) cohort for skeletal and peripheral tissue phenotypes. These mice were anesthetized prior to micro computerized tomography (μCT) scans. Two days later they were CO₂-euthanized and liver, heart, spinal cord, spleen, kidney, and sera were harvested. Total sulfated GAG in each tissue type was assessed using dimethylmethylene blue (DMMB), which is a chromogen that presents an absorption change upon binding the sulfated moiety in GAGs. Similar to Arsb knockout mice, the COIN Arsb mice without tamoxifen treatment showed decreased body weight, decreased tibia lengths, decreased spinal column lengths, increased tibial growth plate width, decreased cranial length:width ratio, and increased GAG accumulation in liver, heart, and kidneys compared to wild type mice. See FIGS. 3-8. Total sulfated GAGs were found to be significantly elevated in liver, heart, and kidney of Arsb^{COIN/COIN} mice. In addition, these mice weighed significantly less. Tomography revealed a difference in overall skeletal size, with long bones (using tibia lengths as representative) of Arsb^{COIN/COIN} mice remarkably shorter. Reduced spinal cord length and coarse facies were also seen, with L6 to L2 lengths significantly shorter, as were cranial length to width ratios.

[0274] To assess phenotype reversibility at different timepoints, the COIN Arsb mice described in Example 1 were treated with 5 daily tamoxifen injections starting at different timepoints: 7 days after birth (P7), 21 days after birth (P21), or 8-10 weeks after birth. For the P7 time point, 1 mg tamoxifen per 25 g body weight was injected. For other time points, 2 mg tamoxifen per 25 g body weight was injected. Mice were taken down at 1 week, 1 month or 3 months after tamoxifen injection. See FIG. 9.

[0275] In order to evaluate percentage of inversion back to the WT orientation of the flipped exon in Arsb, we performed recombination assays using genomic DNA extracted from affected peripheral organs. Following tamoxifen treatment in adult COIN Arsb mice, recombination assays indicated that conversion from the inverted allele back to rescued allele remains stable over time in soft tissue. The gene conversion from the inverted allele to the rescued allele occurred at a rate of ˜60%-80% in the liver and spleen and at a rate of ˜30%-40% in the heart and kidney (as measured by qPCR) following treatment with tamoxifen (FIGS. 34A-34C). No inversion was shown in Cre negative control samples. To confirm that the recombined allele (or the rescued, or post-inversion allele) resulted in a functional Arsb, we performed RT-qPCR to check for presence of Arsb mRNA. Transcript abundance in livers was rescued to WT levels by 3 months post injection regardless of which age the restoration of Arsb was initiated. Transcript levels in the heart and kidney ranged from 20 to 70% of WT when restoration occurred at P56-P70 or P21. All tissue types with treatment at P7 exhibited rescue of Arsb mRNA, most to WT levels. No transcript was detected in Cre negative control samples, where the exon would presumably remain inverted (FIGS. 34A-34C).

[0276] Restoring Arsb expression in the adult mice (injected with tamoxifen 8-10 weeks after birth) reduced glycosaminoglycans (GAGs) in the liver and heart, but had minimal effect on bone lengths. Specifically, mice were dosed with tamoxifen beginning at 8-10 weeks of age according to the dosing paradigm described above. We first sought to assess rescue if GAG accumulation. As shown in FIG. 10, restoration of Arsb at its native locus in adulthood cleared residual GAGs in the liver and heart at 3-months post-tamoxifen injection, with a trend towards reduced residual GAGs in the kidney. Similar reduction in GAG accumulation was observed at 1 month post tamoxifen injection (data not shown). To determine whether restoration of Arsb to the WT state can rescue skeletal growth, we utilized left tibia length as a surrogate measurement. In addition, spinal column length and cranial length to width ratios were determined using μCT. However, as shown in FIG. 11, minimal effects on bone length were seen (the KO control mice exhibited significantly shorter tibia lengths, which were not corrected at either 1 month or 3 months post-tamoxifen treatment in the restoration group), although there was a small but significant increase in the spinal column length (FIG. 12) (there was a moderate, progressive shortening of the spinal column in the KO cohort, which was not corrected by 1 month post-treatment in the restoration group but seemed to be corrected by 3 months post-treatment). Similarly, there were minimal effects on cranial length-to-width ratio, a commonly used method to quantify changes in skull and facial morphology, although there was a significant increase at 3 months post-injection (FIG. 13). Tibial growth plates from tamoxifen-treated cohorts were sectioned and processed with the GAG-specific Alcian Blue stain at 3 months post treatment. Restoration of Arsb in adulthood may not significantly improve the tibial growth plate width phenotype (FIG. 14). In addition, vacuolation in the growth plate was not fully corrected total vacuolated area normalized to growth plate area was reduced, but did not approach WT levels (data not shown). However, high resolution uCT scans of tamoxifen-treated Arsb rescue allele femurs showed that trabecular bone parameters showed significant improvement by 1 month post-tamoxifen treatment in adult mice (FIG. 15). Left femurs from tamoxifen-treated cohorts were extracted, fixed, and μCT scanned ex vivo under high resolution. Trabecular bone, located sub-proximal to growth plates in long bones, is significantly remodeled post differentiation. Consistent with previous models, Arsb COIN (KO) mice displayed increased density in the trabecular space, with significantly increased trabecular bone volume, number of trabeculae, trabecular thickness, and less separation. These parameters correlated with a decrease in structural model indices. Midshaft, mature cortical bone displayed a similar phenotype, with significantly increased cortical bone volume, cortical thickness, and total cortical bone area fraction. Cortical parameters also correlated with differences in shape parameters, e.g. the increase observed in cortical polar moment of inertia. With both trabecular and cortical readouts, restoration of Arsb rescued phenotypes to WT levels.

[0277] Restoring Arsb expression at P21 partially rescued long bone and spinal column length. Specifically, mice were dosed with tamoxifen at post-natal day 21 (P21) according to the dosing paradigm described above. Similar to observations in older mice, restoring Arsb expression at P21 reduced residual GAGs in the liver, heart, and kidney. See FIG. 16. As shown in FIG. 17, tibial lengths showed significant improvement by 1 month post-tamoxifen, and further improvement by 3 months after restoring Arsb expression, yet fail to reach WT lengths. However, the rescue of bone length was significantly reduced compared to restoration of Arsb expression at P7 (see below), suggesting that the treatment window is already closing by P21 for skeletal phenotypes. In addition, there was a trend towards increased spinal column lengths in treated mice, but the difference was not significant (FIG. 18). When restoration is initiated at P21, there was an increasingly significant difference in L2 to L6 lengths from 1 to 3 months post treatment, but even at 3 months post-restoration spinal column length failed to reach WT levels. Likewise, there was not a significant difference in cranial length-to-width ratio between Arsb KO and Arsb rescue mice 1 week, 1 month, or 3 months after dosing at P21 (FIG. 19), and there was not a significant difference in tibial growth plate width between Arsb KO and Arsb rescue mice 1 month or 3 months after dosing at P21 (FIG. 20). Vacuolation in the growth plate was not fully corrected when restoration is initiated at any age (data not shown). Total vacuolated area normalized to growth plate area was reduced in the restoration group but did not approach WT levels (data not shown).

[0278] Restoring Arsb expression at P7 rescued long bone and spinal cord lengths to comparable to wild-type mice. Specifically, mice were dosed with tamoxifen at post-natal day 7 (P7) according to the dosing paradigm described above. Similar to observations in older mice, restoring Arsb expression at P7 reduced residual GAGs in the liver, heart, and kidney at both 1 month and 3 months post-tamoxifen treatment. See FIG. 21 and FIG. 22, respectively. Unlike older mice, tibia lengths were rescued to near-wild type lengths by 1 month post-tamoxifen injection. When Arsb was restored starting at P7, there was full correction of the skeletal length phenotype to WT levels at both 1 and 3 months post-treatment, whereas the diseased, untreated group tibia lengths remain significantly shorter. See FIG. 23 and FIG. 24. Spinal column length and cranial length to width ratios were determined using μCT. When restoration was initiated at P7, we observe full rescue to WT lengths by 3 months post treatment. Mirroring the correction observed in the growth of the post-cranial skeleton, strongly significant effect was seen at 3 months post treatment in the P7 restored cohort, at which cranial length to width ratios are corrected to WT levels. These differences were striking in dorsal radiographs from representative μCT images from each group (data not shown). Spinal column length differences (FIG. 25) and cranial length:width ratios (FIG. 26) between groups were not detected at 1 month post-tamoxifen injections. At 3 months, there was a significant increase in spinal column length and cranial length:width ratio, with both being rescued in treated mice. See FIG. 25 and FIG. 26, respectively. Tibial growth plate widths were rescued to near-wild type lengths by 3 months post-tamoxifen injection. See FIG. 27 and FIG. 28. Vacuolation in the growth plate was not fully corrected with restoration initiated at P7 (data not shown). Total vacuolated area normalized to growth plate area was reduced in the restoration group but did not approach WT levels (data not shown). Left femurs from P7 tamoxifen-treated cohorts were extracted, fixed, and μCT scanned ex vivo under high resolution. Trabecular bone, located sub-proximal to growth plates in long bones, is significantly remodeled post differentiation. Arsb COIN (KO) mice display increased density in the trabecular space (FIG. 35A), with significantly increased trabecular bone volume, number of trabeculae, trabecular thickness, and less separation (FIG. 35B). These parameters correlate with a decrease in structural model indices. Midshaft, mature cortical bone displays a similar phenotype, with significantly increased cortical bone volume, cortical thickness, and total cortical bone area fraction (FIG. 35C). Cortical parameters also correlate with differences in shape parameters, e.g. the increase observed in cortical polar moment of inertia. With both trabecular and cortical readouts, restoration of Arsb rescues phenotypes to WT levels (FIGS. 35A-35C). Analyses performed in adult mice exhibited largely similar results (FIG. 15).

[0279] In order to discern to what degree the current therapeutic standard of care addresses MPS VI phenotypes, we next compared tamoxifen-induced rescue of Arsb expression in the Arsb COIN mice with enzyme replacement therapy (ERT) in which recombinant arylsulfatase B protein (also known as N-acetylgalactosamine-4-sulfatase or galsulfase) is administered. The experimental design is shown in FIG. 29. Four groups of mice (6-8 weeks old) were included: wild type mice, COIN (KO) mice, COIN* (rescue) mice treated with tamoxifen, and COIN (KO)+ERT. The COIN* (rescue) mice were treated with 5 daily intraperitoneal tamoxifen injections as described above. The COIN (KO)+ERT mice were treated with weekly retroorbital intravenous injections of 1 mg/kg recombinant arylsulfatase B protein. In addition, 50 mg/kg of an anti-CD4 blocking antibody was given one day prior to each injection to minimize immune responses to the ERT. The mice were taken down 1 month after the initial injections. WT and untreated COIN mice were used as additional control groups. All mice were μCT scanned at 26 days and euthanized 28 days post tamoxifen injection.

[0280] As shown in FIG. 30, both ERT and restoration of Arsb expression reduced residual GAGs in liver, heart, and kidney, while the untreated COIN (KO) control shows significantly elevated levels. However, as shown in FIG. 31, left tibia lengths were not rescued with 1 month of treatment with ERT at 1.0 mg/kg, whereas restoration of Arsb expression showed significant improvement. Similarly, tibial growth plate widths were improved (i.e. reduced) with Arsb restoration but not with ERT. See FIG. 32 and FIG. 33. In summary, Arsb COIN mice showed a Arsb knockout phenotype in the absence of Cre-mediated recombination. Tamoxifen treatment of Arsb COIN mice at age P21 or later in adulthood had minimal effect on skeletal length. In contrast, tamoxifen treatment of Arsb COIN mice at age P7 rescued skeletal length. Finally, comparison of Arsb restoration versus enzyme replacement therapy suggested that better treatment options may be able to improve skeletal outcomes in patients if treatment begins early.

[0281] Here, we present a new mouse model of MPS VI based on conditional-by-inversion (COIN) methodology, wherein the Arsb gene starts as null and can be restored using Cre. We observe elevated GAG storage in liver, heart, and kidney, along with multiple phenotypes in the skeletal system. Dysostosis multiplex is modeled in our mice, observed as shortened tibial length, spinal cord compression, and decreased cranial length to width ratios. We also observe tibial growth plate widening, along with markedly increased vacuolation. A major advantage of our approach is that we can model the effect of an optimal therapeutic by turning the Arsb gene back to WT, where it is transcriptionally regulated the same way as an original WT allele. In addition, our design allows for genetic controls, e.g., presence or absence of the Cre recombinase, and presence or absence of the floxed exon 5 inversion. This minimizes drug-specific effects as a confounder in phenotype interpretation since we can dose all groups.

[0282] For most tissue types examined and across ages, we see no significant fitness advantage of cell-intrinsic restoration of the Arsb allele, as recombination rates remain fairly consistent across the 1 month and 3 month timepoints.

[0283] To our knowledge, the COIN Arsb model described herein is the first mouse model in MPS VI research to show correction of the skeletal phenotype. Crucially, we show that with sufficiently early treatment, restoration of long bone length is possible. Skeletal readouts that become more pronounced with age—e.g., spinal column lengths and cranial length to width ratios—were also restored, although the magnitude of the effect in younger populations was less. Our most striking data are from mice treated at P7, in which we see a rescue to WT levels of tibial lengths as early as 1 month post tamoxifen treatment, along with rescue of spinal cord compression, cranial length to width ratios, and tibial growth plate widths. In mice treated with tamoxifen at P21, partial rescue is possible, while mice treated at P56-P70 are past the window for major bone growth, and exhibit little improvement. We have extended initial skeletal observations by six months with mice treated at P56-P70—these results confirm long bone length correction plateaus beyond 3 months post treatment (data not shown).

[0284] While most skeletal disease parameters seem to be abrogated to WT levels, increased vacuolation in the growth plate is not completely rescued at any age. It is unclear what the allele conversion rate is in the growth plate. The vacuolation phenotype may also be due to relative lack of metabolic/transcriptional activity of certain cell types, for which Arsb restoration may have little impact.

[0285] Taken together, these data imply that skeletal phenotypes are indeed treatable, and that exogenous enzyme may be limited in efficacy because of the poorly vascularized nature of the growth plate, and the ability of excess GAG to coordinate water. These data also imply that, when delivered early enough, an optimized therapeutic should be able to treat both stature and dysmorphia-related symptoms of MPS VI. Extrapolation of these data to humans based on estimates between human and mouse suggest rescue should be possible if treatment occurs within the first few years of life.

[0286] Our COIN model is remarkably well adapted to the study of lysosomal diseases, as it allows for stringent and complete loss of Arsb expression and function. The majority of lysosomal diseases are at least partly, if not completely, rescued by small amounts of residual enzymatic activity and expression, which is further compounded by secretion and uptake. Here, we show that this model can be used to define potential therapeutic parameters for refractory phenotypes incompletely corrected by current therapeutics.

### Materials and Methods

[0287] Recombination Assays. Genomic DNA were extracted from liver, heart, kidney, and spleen tissue harvested from MPS VI COIN and control mice using the GenElute Mammalian Genomic DNA Miniprep Kit (Sigma-Aldrich, G1N350-1KT). Genomic DNA from untreated COIN and WT mice were mixed at serial percentages to produce standard curves (100, 90, 75, 60, 40, 20, 0 percent COIN genomic DNA) on each plate. 50-100 ng of total genomic DNA were used per reaction in quantitative PCR using the 2× PowerUp SYBR Green Master Mix (ThermoFisher, A25742) with 1.0 μM of the following primers as appropriate: EHW092 (Arsb COIN fwd): AGGCCAAGATTGACAGTTACCAG (SEQ ID NO: 19); EHW093 (Arsb COIN rev): GGAGTACAGGGAAGGAAACCT (SEQ ID NO: 21); EHW094 (GAPDH fwd): CATGGCCTTCCGTGTTCCTA (SEQ ID NO: 51); EHW095 (GAPDH rev): CCTGCTTCACCACCTTCTTGAT (SEQ ID NO: 52). Technical duplicates for GAPDH reactions and technical triplicates for Arsb COIN reactions were used to assess average CT values. ACT values were compared to standards to assess percentage recombination.

[0288] RT-qPCR. For RNA Extraction: Tissue samples were homogenized in TRIzol, and chloroform was used for phase separation. The aqueous phase, containing total RNA, was purified using MagMAX™-96 for Microarrays Total RNA Isolation Kit (Ambion by Life Technologies) according to manufacturer's specifications. Genomic DNA was removed using RNase-Free Dnase Set (Qiagen).

[0289] For First Strand Synthesis and Quantitative PCR: mRNA was reverse-transcribed into cDNA using SuperScript® VILO™ Master Mix (Invitrogen by Life Technologies). cDNA was amplified with the SensiFAST Probe Lo-ROX (Meridian) using the 12K Flex System (Applied Biosystems). GAPDH was used to normalize any cDNA input differences. Primer sequences used were the following: Arsb fwd—CCAAACCTCTGGATGGCTTCAAC (SEQ ID NO: 53); Arsb rev—GTCCTGATCGATGTTGTGTAGCAG (SEQ ID NO: 54); Arsb probe—AAGACAATCAGTGAAGGACACCCATCCC (SEQ ID NO: 55); Gapdh fwd—TGCCCAGAACATCATCCCT (SEQ ID NO: 56); Gapdh rev—GGAGGCCATGCCAGTGAG (SEQ ID NO: 57); Gapdh probe—ATCCACTGGTGCTGCCAAGGCTG (SEQ ID NO: 58). Data were acquired in technical triplicate and were calculated with mean CT using the ΔΔCT method, with WT samples as references.

[0290] GAG Accumulation Assays. Tissue Digestion for Glycosaminoglycan Isolation Finely minced organ tissue was resuspended at a concentration of 10 mg/mL in 0.3 mg/mL papain+2 mM DTT and incubated at 60° C. for 1.5 hours, with samples gently vortexed every 15 minutes. 10 μL of 1M acetic acid and 40 μL of Tris-HCl (pH 8.0) were added per 1 mL of organ lysate and mixed well (AMSBio, 280560-TDK).

[0291] Sulfated Glycosaminoglycan Quantitation. A standard curve was produced using five 4-fold serial dilutions from 100 μg/mL chondroitin sulfate. 4-fold dilutions of each sample was created in duplicate in 1× assay buffer (AMSBio, 280560-N). 100 μL of standards and experimental samples were transferred to a clear bottom plate, then mixed with 100 μL of 100 mM dimethylmethylene blue. Absorbances at 515 nm were assessed within 15 minutes and compared to standard curves (AMSBio, 280560-N).

[0292] Skeletal Analyses. For μCT analyses, mice were anesthetized using isoflurane and dynamically scanned using 17s×2 or 8s×3 algorithms on Quantum FX or Quantum GX computerized tomographs (PerkinElmer) to produce whole skeletal images. Stitched vox files were analyzed using Analyze14.0 software. All lengths were determined using the line draw tool and double checked with single-blinded analyses. For high resolution μCT femoral analyses, mice were C02-euthanized and left femurs were extracted then drop fixed in 10% formalin (VWR, 16004-121). Samples were incubated rotating at 4° C. for 48 hours, washed 4 times with 1×DPBS (Gibco, 14040), and stored in 70% ethanol until scans on a Scanco μCT35. Transverse CT slices were evaluated in the region starting 360 μm proximal to the growth plate and extending 1440 μm. The trabecular bone region was identified manually by tracing the region of interest. Images were threshholded using an adaptive-iterative algorithm and morphometric variables were computed from the binarized images using direct, 3D techniques that do not rely on any prior assumptions about the underlying structure. Transverse CT slices were also evaluated in the midshaft region, extending 120 μm.

[0293] Histology and Growth Plate Analyses. Right knee joints were harvested from freshly CO₂-euthanized mice and drop fixed in 4% paraformaldehyde. Samples were fixed for 48 hours, decalcified, embedded in paraffin, and sectioned at two levels on the longitudinal axis. Sections were stained with Alcian blue with fast red counterstain, or Safranin O with fast green counterstain (Histoserv). Growth plate widths were assessed on Alcian Blue stained samples as a mean with HALO software (Indica Labs), using the layer thickness tool at an approximate interval of 55 μM with maximal smoothing. Vacuolation was assessed on SafO stained samples with HALO software using the Vacuole Module as total vacuolated area over total growth plate area.

[0294] Mouse Lines and Injections. Mouse Line Generation. A large targeting vector (LTVEC) with a 5′ homology arm comprising 81 kb of the mouse Arsb locus and 3′ homology arm comprising 102 kb of the mouse Arsb locus was generated to replace a region surrounding exon 5 with a corresponding inverted region flanked by a 5′ lox71 site and a 3′ lox66. A roxed self-deleting cassette was inserted downstream of the inverted sequence. To generate the mutant allele, the LTVEC was introduced into mouse embryonic stem cells. Specifically, 2×10⁶ mouse VGF1 embryonic cells (50% C57BL/6NTac 50% 12956/SvEvTac) carrying CreER^{T2} in the Gt(ROSA26)Sor locus were electroporated with 0.4 μg mArsb LTVEC. Antibiotic selection was performed using G418 at a concentration of 100 mg/mL. Colonies were picked, expanded, and screened by TAQMAN®. F0 mice were generated from above modified ES cells using the VELOCIMOUSE® method. Specifically, mouse ES cell clones described above were selected and injected into 8-cell stage embryos using the VELOCIMOUSE® method.

[0295] Injections. For P7, P21, and P56-P70 restoration experiments, tamoxifen (Sigma, T5648) was resuspended in sterile corn oil (Sigma, C8267) at 10 mg/mL or 5 mg/mL and injected via the intraperitoneal route at the appropriate doses normalized to mouse weight daily for five consecutive days. T cell depletion was accomplished with intraperitoneal injection of an α-CD4 antibody (BioXCell, BE0003-3) at 50 mg/kg, weekly. Galsulfase delivery was accomplished with retro-orbital intravenous injection of recombinant human ARSB (BioMarin, Naglazyme lot L061938) at 1 mg/kg, weekly. Antibodies and enzymes were diluted to appropriate doses in 0.9% sodium chloride (Intermountain Life Sciences, Z1376).

[0296] Flow Cytometry. Freshly harvested spleens were placed into cold RPMI (Irvine Scientific, 9161), manually dissociated and pushed through a 74 μM filter (Costar, 3477). Splenocytes were washed once with cold RPMI, and RBC lysis buffer was added (Sigma, R7757). After a 2-minute incubation, cells were washed twice with cold DPBS (Gibco, 14040), filtered again through a 100 μM filter (EMD Millipore, MANM10010), and resuspended in 1 mL of cold DPBS. 100 μL of each sample was used for experimental staining, and 100 μL of each sample was pooled for use in FMOs and controls. Cells were stained with a 500× dilution of Live/Dead Blue (Invitrogen, L34962)×15 minutes, washed, then blocked with CD16/32 (Tonbo, 70-0161-M001) diluted 50× in MACS Buffer (Miltenyi Biotec, 130-091-221)×15 minutes at 4° C. Appropriate antibodies were added at the below dilutions resuspended in Brilliant Stain Buffer (Becton Dickinson, 566349) and incubated at 4° C.×30 minutes. Splenocytes were washed twice with cold MACS Buffer and fixed with Cytofix (Becton Dickinson, 554655) at 4° C.×15 minutes. Splenocytes were washed twice with cold DPBS then resuspended in MACS Buffer. Cells were filtered a final time (Pall, 8027) before acquisition on a LSRFortessa X-20 flow cytometer (Becton Dickinson). Population percentages and scatter profiles were assessed using FlowJo, all gates were drawn against FMO samples, and data were plotted using Prism.

| Name/Antigen | Conjugate | Reactivity | Host | Clone | Isotype | Supplier | Cat # | Dilution (1/x) |
|---|---|---|---|---|---|---|---|---|
| CD8 | PerCP-Cy5.5 | Mouse | Rat | 53-6.7 | IgG2a, K | Biolegend | 100734 | 200 |
| XCR1 | BV421 | Mouse/Rat | Mouse | ZET | IgG2b, k | Biolegend | [symbol] 148216 | 200 |
| CD19 | BV510 | Mouse | Rat | 6D5 | IgG2a, K | Biolegend | [symbol] 115545 | 200 |
| CD11b | BV605 | Mouse/Human | Rat | M1/70 | IgG2b, K | BD | [symbol] 563015 | 200 |
| F4/80 | BV711 | Mouse | Rat | T45-2342 | IgG2a, K | BD | [symbol] 565612 | 50 |
| CD3 | BV786 | Mouse | Hamster | 145-2C11 | IgG1, K | BD | [symbol] 564379 | 200 |
| B220 (aka | BUV395 | Mouse | Rat | RA3-6B2 | IgG2a, K | BD | [symbol] 563793 | 200 |
| CD45R) | | | | | | | | |
| CD11c | BUV737 | Mouse | Hamster | HL3 | IgG1, A2 | BD | [symbol] 564986 | 200 |
| CD4 | BUV805 | Mouse | Rat | GK1.5 | IgG2b, k | BD | [symbol] 564922 | 200 |
| Ly6G | APC | Mouse | Rat | 1A8-Ly6g | IgG2a, K | Invitrogen/ | 17-9668-82 | 200 |
| | | | | | | TF/eBioscience | | |
| I-A/I-E | lexa Fluor 70 | Mouse | Rat | M5/114.15.2 | IgG2b, K | Biolegend | [symbol] 107622 | 200 |
| pDCA-1 | PE-Cy7 | Mouse | Rat | eBio927 | IgG2b, K | Invitrogen/TF/ | 25-3172-82 | 200 |
| (aka CD317) | | | | | | eBioscience | | |

### Example 3. Generation of a COIN Mouse Model of Mucopolysaccharidosis I

[0297] Mucopolysaccharidosis I (MPS I) is a lysosomal disease resulting from impaired function of the alpha-L-iduronidase (IDUA) protein. To date, no models of disease exist that separate treatment efficacy from disease reversibility.

[0298] To this end, we have generated a “conditional-on” mouse model of MPS I, using a Rosa Cre-ERT2 plus floxed-inversion approach (COIN). This approach allowed us to turn back “on” endogenous expression of the missing enzyme at several points during disease progression.

[0299] A large targeting vector (LTVEC) comprising a 5′ homology arm comprising 46 kb of the mouse Idua locus and 3′ homology arm comprising 38 kb of the mouse Idua locus was generated to replace a region from intron 3 through the 3′ UTR with a corresponding inverted region flanked by a 5′ lox71 site and a 3′ lox66. A roxed self-deleting cassette was inserted downstream of the inverted gene. Information on the mouse Idua gene is provided in Table 8. A description of the generation of the large targeting vector is provided in Table 9. Generation and use of large targeting vectors (LTVECs) derived from bacterial artificial chromosome (BAC) DNA through bacterial homologous recombination (BHR) reactions using VELOCIGENE® genetic engineering technology is described, e.g., in U.S. Pat. No. 6,586,251 and Valenzuela et al. (2003) Nat. Biotechnol. 21(6):652-659, each of which is herein incorporated by reference in its entirety for all purposes. Generation of LTVECs through in vitro assembly methods is described, e.g., in US 2015/0376628 and WO 2015/200334, each of which is herein incorporated by reference in its entirety for all purposes.

TABLE 8
Mouse Idua.

| | Gene | NCBI | RefSeq | UniProt | | |
|---|---|---|---|---|---|---|
| | Symbol | Gene ID | mRNA ID | ID | Genomic Assembly | Chromosomal Location |
| Mouse | Idua | 15932 | NM_008325.4 | P48441 | GRCm38/mm10 | chr5:108,660,331- |
| | | | | | | 108,684,552 (+) |

TABLE 9
Mouse Idua Large Targeting Vector.

| | | | | Length |
|---|---|---|---|---|
| | Genome Build | Start | End | (bp) |
| 5′ Mouse Arm | GRCm38/mm10 | chr5: | chr5: | 46,205 |
| | | 108,632,847 | 108,679,152 | |
| Human Insert | GRCm38/mm10 | chr5: | chr5: | 5,810 |
| | | 108,684,982 | 108,679,173 | |
| 3′ Mouse Arm | GRCm38/mm10 | chr5: | chr5: | 38,286 |
| | | 108,685,003 | 108,723,289 | |

[0300] Specifically, a region from intron 3 through the 3′ UTR of the Idua gene was inverted in the mouse Idua locus. The inverted region (SEQ ID NO: 49) is flanked by a 5′ lox71 site and a 3′ lox66. A roxed self-deleting cassette was inserted 3′ of the inverted region. This is the MAID 8375 allele (SEQ ID NO: 10). The allele after cassette deletion is the MAID 8376 allele (SEQ ID NO: 11). The cassette-deleted allele after rescue by inversion of the inverted region (reinverted region set forth in SEQ ID NO: 50) is the MAID 8377 allele (SEQ ID NO: 12). See FIG. 36.

[0301] The expected encoded IDUA protein after rescue by inversion of the inverted region is a fully mouse IDUA protein. See FIG. 36. The mouse IDUA protein and Idua coding sequences are set forth in SEQ ID NOS: 4 and 6, respectively.

[0302] To generate the mutant allele a large targeting vector was introduced into mouse embryonic stem cells. Specifically, 2×10⁶ mouse VGF1 embryonic cells (50% C57BL/6NTac 50% 129S6/SvEvTac) carrying a Rosa26-CreER^{T2} allele were electroporated with 0.4 μg mIdua COIN LTVEC. The electroporation conditions were: 400 V voltage; 100 mF capacitance; and 0 W resistance. Antibiotic selection was performed using G418 at a concentration of 100 mg/mL. Colonies were picked, expanded, and screened by TAQMAN®. See FIG. 37. Loss-of-allele assays were performed to detect loss of the endogenous mouse allele, and retention assays were performed using the primers and probes set forth in Table 10. To detect the mIdua gene inversion, after tamoxifen-Cre activation, mouse tissue was assayed by qPCR using the primers and probes set forth in Table 10.

TABLE 10
Screening Assays.

| | | | | SEQ |
|---|---|---|---|---|
| | | | | ID |
| Assay | Description | Primer/Probe | Sequence | NO |
| mTU | Upstream LOA | Fwd | TCACGTCTTTCCACCTCAGTG | 31 |
| | | Probe (FAM) | TGACTGACCAGAGCCCTACTTGA | 32 |
| | | Rev | GTGTGTGTCTGAAACCTTCAAGA | 33 |
| mTD | Downstream LOA | Fwd | GGCTGATGTTCCTACCTTGGTT | 34 |
| | | Probe (Cal-Orange) | CTGGCCACGGGAAGAACCCTCT | 35 |
| | | Rev | TGTGTCCAACAGGCTCTCT | 36 |
| mretU | Upstream | Fwd | GGGCAGGGACTTATGTACAAC | 37 |
| | Retention Assay | Probe (FAM) | TCACCCACTTGGATGCATTCTTGGA | 38 |
| | | Rev | GCTCACCAGGGAGAAGCT | 39 |
| mretD | Downstream | Fwd | TCCCAGAAAGGTGAAGAGTATGC | 40 |
| | Retention Assay | Probe (Cal) | CCCAATCAACAGGAGGCCGTCTAC | 41 |
| | | Rev | GGGCTGAACACAAAGAGGTTA | 42 |
| 8377JXmU | 5′ Junction mIdua- | Fwd | GTCACCTGTCTCACGTCTTTC | 43 |
| | ON | Rev | GTGAATGTGTGTGTCTGAAACC | 44 |
| 8377JXmD | 3′ Junction mIdua- | Fwd | AGCCTGGGCTGATCTTAATAG | 45 |
| | ON | Rev | CGCTACCTTAGGACCGTTATAG | 46 |

[0303] Modification-of-allele (MOA) assays including loss-of-allele (LOA) and gain-of-allele (GOA) assays are described, for example, in US 2014/0178879; US 2016/0145646; WO 2016/081923; and Frendewey et al. (2010) Methods Enzymol. 476:295-307, each of which is herein incorporated by reference in its entirety for all purposes. The loss-of-allele (LOA) assay inverts the conventional screening logic and quantifies the number of copies in a genomic DNA sample of the native locus to which the mutation was directed. In a correctly targeted heterozygous cell clone, the LOA assay detects one of the two native alleles (for genes not on the X or Y chromosome), the other allele being disrupted by the targeted modification. The same principle can be applied in reverse as a gain-of-allele (GOA) assay to quantify the copy number of the inserted targeting vector in a genomic DNA sample.

[0304] Retention assays are described in US 2016/0145646 and WO 2016/081923, each of which is herein incorporated by reference in its entirety for all purposes. Retention assays distinguish between correct targeted insertions of a nucleic acid insert into a target genomic locus from random transgenic insertions of the nucleic acid insert into genomic locations outside of the target genomic locus by assessing copy numbers of DNA templates from 5′ and 3′ target sequences corresponding to the 5′ and 3′ homology arms of the targeting vector, respectively. Specifically, retention assays determine copy numbers in a genomic DNA sample of a 5′ target sequence DNA template intended to be retained in the modified target genomic locus and/or the 3′ target sequence DNA template intended to be retained in the modified target genomic locus. In diploid cells, correctly targeted clones will retain a copy number of two. Copy numbers greater than two generally indicate transgenic integration of the targeting vector randomly outside of the target genomic locus rather than at the target genomic locus. Copy numbers of less than generally indicate large deletions extending beyond the region targeted for deletion.

[0305] F0 mice were generated from the modified ES cells using the VELOCIMOUSE® method. Specifically, mouse ES cell clones comprising the modified Idua locus described above that were selected by the MOA assay described above were injected into 8-cell stage embryos using the VELOCIMOUSE® method. See, e.g., U.S. Pat. Nos. 7,576,259; 7,659,442; 7,294,754; US 2008/0078000; and Poueymirou et al. (2007) Nat. Biotechnol. 25(1):91-99, each of which is herein incorporated by reference in its entirety for all purposes. In the VELOCIMOUSE® method, targeted mouse ES cells are injected through laser-assisted injection into pre-morula stage embryos, e.g., eight-cell-stage embryos, which efficiently yields F0 generation mice that are fully ES-cell-derived. In the VELOCIMOUSE® method, the injected pre-morula stage embryos are cultured to the blastocyst stage, and the blastocyst-stage embryos are introduced into and gestated in surrogate mothers to produce the F0 generation mice. When starting with mouse ES cell clones homozygous for the targeted modification, F0 mice homozygous for the targeted modification are produced. When starting with mouse ES cell clones heterozygous for the targeted modification, subsequent breeding can be performed to produce mice homozygous for the targeted modification.

### Example 4. Use of COIN Model in MPS I to Define Phenotype Reversibility

[0306] The mouse model generated in Example 3 allows restoration of Idua expression from the native locus at desired timepoints, bypassing the limitations of enzyme replacement therapy (ERT). In the absence of tamoxifen, IDUA production is “off,” replicating the Idua knockout phenotype, because the region from intron 3 through the 3′ UTR of the Idua gene is inverted. In the presence of tamoxifen, expression of Cre recombinase is induced, and the Cre recombinase inverts the inverted region, flipping it back into the correct orientation, restoring wild type Idua expression.

[0307] The COIN Idua mice were first assessed in the absence of tamoxifen to assess whether they display key features of MPS I. COIN Idua mice were examined alongside an age and sex matched wild type (WT) cohort for skeletal and peripheral tissue phenotypes. These mice were anesthetized prior to micro computerized tomography (μCT) scans. Two days later they were CO₂-euthanized and liver, heart, spinal cord, spleen, kidney, and sera were harvested. Total sulfated GAG in each tissue type was assessed using dimethylmethylene blue (DMMB), which is a chromogen that presents an absorption change upon binding the sulfated moiety in GAGs. The COIN Idua mice without tamoxifen treatment showed decreased tibia lengths, decreased spinal column lengths, decreased cranial length:width ratio, restricted ribcage width, and increased GAG accumulation in liver, heart, and kidneys compared to wild type mice but not significant difference in zygomatic arch L/W ratios. See FIGS. 38-42 and 44. Thus, the COIN Idua mice replicate an MPS I skeletal phenotype (shorter tibias, spinal column length, cranial length to width ratios, and ribcage widths) and replicate a GAG accumulation phenotype (in the liver, heart, and kidney).

[0308] To assess phenotype reversibility at different timepoints, the COIN Idua mice described in Example 3 are treated with 5 daily tamoxifen injections starting at different timepoints, similar to Example 2. Mice are taken down at different time points after tamoxifen injection. Behavioral, histological, and molecular readouts are assessed at the different time points. In a first experiment, the COIN Idua mice described in Example 3 are treated with 5 daily tamoxifen injections starting at 8-10 weeks after birth, and mice were taken down at 1 month and 3 months after tamoxifen injection. See FIG. 43. As shown in FIG. 44, GAG accumulation occurs in liver, heart, and kidneys in the knockout mice, and this is rescued by one month post-tamoxifen treatment.

[0309] Behavioral testing includes open field, fear conditioning, and elevated plus maze experiments as described below. For COIN Idua mice (IDUA production is “off”) we would expect decreased exploratory behavior on the open field, decreased anxiety on the elevated plus (more time spent in open arms), and impaired long term memory in fear conditioning.

[0310] Open Field. Kinder Scientific apparatus is used. Mice are placed in the open field and allowed to move freely while they are monitored for 15 to 120 minutes. The apparatus uses infrared beams and computer software to calculate fine movements, X+Y ambulation, distance traveled, number of rearing events, time spent rearing, and immobility time.

[0311] Fear Conditioning. A shuttlebox apparatus is used that is equipped with a tone generator and a gridded floor through which shock can be delivered. Mice are acclimated to the procedure room for 45 minutes to 1 hour prior to beginning test. For training on day 1, animals are taught to associate a tone and/or the context with a footshock. Footshock is paired with a tone by sequentially or simultaneously administering a shock with the tone (no more than 5 seconds, 0.8 mA). Footshock is paired with the context by shocking the animal once it is placed in the box. Some amount of conditioning to context is also apparent from the tone-shock animals. Learning can occur with as little as one shock. Animals are never shocked more than 10 times to achieve this learning. On day 2, learning is evaluated by later measuring the animal's freezing behavior in response to the tone or the context (the box in which the animal was shocked). Controls for non-specific freezing are exposure to a novel context which has never been associated with a shock and exposure to a tone which was either never paired with the shock, or was present with the shock, but in a non-predictive, non-associative fashion. Because mice do not freeze for long periods of time, they are evaluated for freezing behavior in 5 second time bins. They receive a score of 0 for every bin in which they move, and a score of 1 for every bin in which they do not. Mice are evaluated for 30 seconds to 5 minutes. Mice with higher scores are considered more fearful, and will hence have learned the association better.

[0312] Elevated Plus Maze. The elevated plus maze is a widely used behavioral task for rodents to measure anxiety. The basic measure of this task is the animals' preference for dark and not exposed places (Walf and Frye (2007) Nat. Protoc. 2(2):322-328, herein incorporated by reference in its entirety for all purposes). The maze consists of two open and two closed arms. The arms form a cross shape with the two similar arms opposite to each other. The animals are placed at the center of the maze, facing an enclosed arm. The behavior of the animals is recorded for 5 minutes with a camera located above the maze. Time spent in the different compartments (closed and open arms; also center) is measured. The maze is cleaned with 70% ethanol between trials. Anxiety is assessed by comparing the activity in the open versus closed arms, using an index taking into account the time spent in each category of arm as the ratio open arms/closed arms. The relationship between index value and anxiety level is inversely analogous, meaning that the higher the index value the lower the level of anxiety.

The application's sequence listing, which the Patent Office published only in electronic form, follows.

SEQUENCE LISTING (58 sequences)

SEQ ID NO: 1 - protein, 534 aa, Mus musculus
  REGION 1..39: note = MISC_FEATURE - Signal Peptide
  REGION 40..534: note = MISC_FEATURE - Intracellular Domain
MGKLSPCTGRSRPGGPGPQLPLLLLLLQLLLLLLSPARASGATQPPHVVFVLADDLGWNDLGFHGSVIRTPHLDALAAGGVVLDNYYVQPLCTPSRSQLLTGRYQIHLGLQHYLIMTCQPSCVPLDEKLLPQLLKEAGYATHMVGKWHLGMYRKECLPTRRGFDTYFGYLLGSEDYYTHEACAPIESLNGTRCALDLRDGEEPAKEYNNIYSTNIFTKRATTVIANHPPEKPLFLYLAFQSVHDPLQVPEEYMEPYGFIQDKHRRIYAGMVSLMDEAVGNVTKALKSHGLWNNTVFIFSTDNGGQTRSGGNNWPLRGRKGTLWEGGIRGTGFVASPLLKQKGVKSRELMHITDWLPTLVDLAGGSTNGTKPLDGFNMWKTISEGHPSPRVELLHNIDQDFFDGLPCPGKNMTPAKDDSFPLEHSAFNTSIHAGIRYKNWKLLTGHPGCGYWFPPPSQSNVSEIPPVDPPTKTLWLFDINQDPEERHDVSREHPHIVQNLLSRLQYYHEHSVPSHFPPLDPRCDPKSTGVWSPWM

SEQ ID NO: 2 - DNA, 3989 bp, Mus musculus
  source 1..3989: mol_type = other DNA
ggcccgcccaggtggatgaaatcttgctggggagcccggccgctcagttcccgattctgtcgggggtgcccgcagcacgggctctgcaggctgctaaggatgggcaagcttagcccgtgcactggcaggagccggcctggaggtcccgggccgcagctgccactcttgctgctgctgctgcagctgctgctgctgctgctgtcgccggcccgggcctccggagctacccagcctccgcatgtggtcttcgtgctggcggacgacctgggctggaacgacttgggttttcacggctcggtcatccgcacgccgcacctggatgcgctggcggccggcggcgtggtcctggacaactactacgtgcagccgctgtgcacgccctcgcggagccagctgctcaccggccgctatcagatccatttgggcttacagcattacctcatcatgacctgtcagcccagctgtgttcccctagacgaaaaactcctgccccagcttttaaaggaagcaggctatgctacgcacatggtcgggaaatggcacctggggatgtaccggaaagaatgtctgccgacacgccgaggattcgatacctacttcggatacctcctaggcagtgaagactattacacccacgaggcctgtgcgccgattgagtctttgaatggtacccgctgtgcgcttgacttaagagatggtgaagaacctgcaaaagagtataacaatatttactcaacaaacatatttaccaaaagggctacaaccgtcatagctaaccacccaccggagaaaccactgttcctctaccttgctttccagtctgtccacgatcccctgcaggtccctgaggagtacatggagccatatggcttcatccaagataagcacagacgtatttatgcagggatggtgtccctcatggatgaagcagtggggaacgtcaccaaagccttgaaaagccacgggctctggaacaacacggtcttcatcttctccacagataacggtgggcagactaggtctggaggcaacaactggccactccgaggaaggaaggggaccctgtgggaagggggcatccgaggaacgggcttcgtggcaagccccttgctgaaacagaaaggcgtgaagagccgggaactcatgcacatcaccgattggctccccacactcgtagatctggctgggggaagcactaatggaaccaaacctctggatggcttcaacatgtggaagacaatcagtgaaggacacccatccccgagagtggagctgctacacaacatcgatcaggacttttttgatggcttgccatgtcctggcaagaacatgactccagcaaaggacgattcttttccgttagaacattctgcctttaacacgtctatccatgctgggatcagatacaaaaattggaaactcctcacgggccacccaggctgtggttactggttcccgcctccgtctcagtccaacgtctctgagatacctccagtggacccaccaaccaagactctctggctttttgatatcaatcaggaccctgaagaaagacacgacgtgtcccgagagcacccccacatcgtccagaaccttctttcccgcctgcagtactaccatgaacattctgtgccttctcacttcccacccttggacccccgctgcgatcccaagagcactggtgtgtggagcccctggatgtagggctctggggagtaaggggggctggagcccatttctgggcaggctagacctcaggcccctactcccctggcttctcttctttatcatcccccaccctgtcacctggccctcatgctacataacccaccaaaggagtccaatttcaacccacagtacattctaaaagccagtaaaatctggaaggatcttgctgttggctggagttagtgtctggggccagggtggccgggttcatcctgcttcctaaactacagacgctgggaacttgacataggaagttatccctgagtcctggaggccaggacagctggctctttttgcttcacaagtcagctgttagaactccctctgctaataaccagctttattggcaagacacatttcttgtaacaaaggcagggagcagatgttgctagtggttctgttggctgtgagtgctccctgtctgtgagctcttactcgggctttccgcacccatgaccctaaccctaaccctaaccctaaccctaaccctaaccctaaccctaaccctagccctagccctagccctagccctagccctaacccatccgctcactcatcttcctgtggagcgcacagcccattgcagtaagccagcatggagacatgcctgtgccgtggttttggtttccatgataactaaatgtgtttttatctccacccccacccccacccactattgctcattctgtctagacttctgctacccagcttgtgtggctctgttcctgtcatgcctttggacttcactgtcctgtgcctgaggtctctctcccctctgcttcacccattctgagctttaggatagtcctaagccctgcccagaggaggtggactggtcattctgtgtccatgctaatgggagttgtgggtctgtggcatctgctaaggaggattattcacagttgcatggaatctgtcaagattgtggctatatctcccactatgccatggtctatgctgttttctcaagcagtggcaagaaaggccaggatagcacttcttcgccctgagcagtctcagaaaggaagtggccatggaatgttggcctcagtaaggcagaggagacaccatccatgtccctttcattctctgtttcactgccctgttctggggctctggattctgggcttggagaatgaggatacactatttgactgtcagccctttctcagaccctcatacatcttaccgatgtgagtccaccagattcgcagcagggtgtgtcaaacccagtggtacttctcattaacacctctgtctcattcacagtttatcaccaacatcagcaaccatgtctgcgacataatagatagccagtactttttaaaaatgaattaataaacaaagtaaacgagaaagagttacctggcatttactagtccagtgagctgactgtaagggcagaataaatatcctccagcccttccgattctgtcctcaagctgtcccctcccacctctgcgctagcgggagaatgatctgggcagtcaatgaatggcaggtctgtgatggcctctgcaggtagacaaaagagaattctgcttcccgggaagtctcctttgccagcaatctccatttccattcttcactgcacactaggaattaaaaccaccaaataatatgatatgcacagtcatcttcagttcagtagcagcatctcctggtcattaatattctgtattttattatggtaagagtattataagaaaatggtactatggctaatgacatcttttaccaacctttacccaacttggctgacatatagcctgccattaggacactttttactccaaagactgtgacagagtctgagtgacatgagtctgaatactcctcctgtgtcctcctgtagctataggtggactgacggtccctacttcataacacctacctgatcgttccttagtgttctcagaacagctgtcctcagttccagctgtgactgtaggcagtgtttggaatattagcataactaatggatttaagaagactttcagaaagtgattcttaaaaataactggaggttttgtctgataaaacaaatagaatggaatatgtctcagattatatctcattggattttcatgtttgatacaaaagtaaaagcttgataacctatttttagagatattaatgttagttctttccaattttgtttaaccttgaagattttatttaacttgtgaacttactcctttgttatgccatgattgttccagatttgaggaacaaaataaaataaaatctttctaaaacta

SEQ ID NO: 3 - DNA, 1605 bp, Mus musculus
  misc_feature 1..117: note = Signal Peptide
  misc_feature 118..1605: note = Intracellular Domain
  source 1..1605: mol_type = other DNA
atgggcaagcttagcccgtgcactggcaggagccggcctggaggtcccgggccgcagctgccactcttgctgctgctgctgcagctgctgctgctgctgctgtcgccggcccgggcctccggagctacccagcctccgcatgtggtcttcgtgctggcggacgacctgggctggaacgacttgggttttcacggctcggtcatccgcacgccgcacctggatgcgctggcggccggcggcgtggtcctggacaactactacgtgcagccgctgtgcacgccctcgcggagccagctgctcaccggccgctatcagatccatttgggcttacagcattacctcatcatgacctgtcagcccagctgtgttcccctagacgaaaaactcctgccccagcttttaaaggaagcaggctatgctacgcacatggtcgggaaatggcacctggggatgtaccggaaagaatgtctgccgacacgccgaggattcgatacctacttcggatacctcctaggcagtgaagactattacacccacgaggcctgtgcgccgattgagtctttgaatggtacccgctgtgcgcttgacttaagagatggtgaagaacctgcaaaagagtataacaatatttactcaacaaacatatttaccaaaagggctacaaccgtcatagctaaccacccaccggagaaaccactgttcctctaccttgctttccagtctgtccacgatcccctgcaggtccctgaggagtacatggagccatatggcttcatccaagataagcacagacgtatttatgcagggatggtgtccctcatggatgaagcagtggggaacgtcaccaaagccttgaaaagccacgggctctggaacaacacggtcttcatcttctccacagataacggtgggcagactaggtctggaggcaacaactggccactccgaggaaggaaggggaccctgtgggaagggggcatccgaggaacgggcttcgtggcaagccccttgctgaaacagaaaggcgtgaagagccgggaactcatgcacatcaccgattggctccccacactcgtagatctggctgggggaagcactaatggaaccaaacctctggatggcttcaacatgtggaagacaatcagtgaaggacacccatccccgagagtggagctgctacacaacatcgatcaggacttttttgatggcttgccatgtcctggcaagaacatgactccagcaaaggacgattcttttccgttagaacattctgcctttaacacgtctatccatgctgggatcagatacaaaaattggaaactcctcacgggccacccaggctgtggttactggttcccgcctccgtctcagtccaacgtctctgagatacctccagtggacccaccaaccaagactctctggctttttgatatcaatcaggaccctgaagaaagacacgacgtgtcccgagagcacccccacatcgtccagaaccttctttcccgcctgcagtactaccatgaacattctgtgccttctcacttcccacccttggacccccgctgcgatcccaagagcactggtgtgtggagcccctggatgtag

SEQ ID NO: 4 - protein, 643 aa, Mus musculus
  REGION 1..25: note = MISC_FEATURE - Signal Peptide
  REGION 26..643: note = MISC_FEATURE - Intracellular Domain
MRPPRPSSAMLTFFAAFLAAPLALAESPYLVRVDAARPLRPLLPFWRSTGFCPPLPHDQADQYDLSWDQQLNLAYIGAVPHSGIEQVRIHWLLDLITARKSPGQGLMYNFTHLDAFLDLLMENQLLPGFELMGSPSGYFTDFDDKQQVFEWKDLVSLLARRYIGRYGLTHVSKWNFETWNEPDHHDFDNVSMTTQGFLNYYDACSEGLRIASPTLKLGGPGDSFHPLPRSPMCWSLLGHCANGTNFFTGEVGVRLDYISLHKKGAGSSIAILEQEMAVVEQVQQLFPEFKDTPIYNDEADPLVGWSLPQPWRADVTYAALVVKVIAQHQNLLFANSSSSMRYVLLSNDNAFLSYHPYPFSQRTLTARFQVNNTHPPHVQLLRKPVLTVMGLMALLDGEQLWAEVSKAGAVLDSNHTVGVLASTHHPEGSAAAWSTTVLIYTSDDTHAHPNHSIPVTLRLRGVPPGLDLVYIVLYLDNQLSSPYSAWQHMGQPVFPSAEQFRRMRMVEDPVAEAPRPFPARGRLTLHRKLPVPSLLLVHVCTRPLKPPGQVSRLRALPLTHGQLILVWSDERVGSKCLWTYEIQFSQKGEEYAPINRRPSTFNLFVFSPDTAVVSGSYRVRALDYWARPGPFSDPVTYLDVPAS

SEQ ID NO: 5 - DNA, 4430 bp, Mus musculus
  source 1..4430: mol_type = other DNA
ctctgtgcccacccactgccaagagggacaggtctcaaaggtcagggcagtgtcccgggaaggagggcatcggctcctgggagcggccttaggacgcggggtggactctcaccatcgcacaggaagccagccagtccccagatgaagtccgagcagaggtggcagaagagcacctacaggcctccagcgagaccgagacagccgcaagaataatggccgctctgagacacccaagcactgctaatgttggttccatttttggagcgcctgggacgcagcggaactcgccagcacggggcggcgcgtgactgggttcctttttgtcccggcctggcgagaggtcacgtggggcgttacgcagaggcggaacactgcgaccgccgcctaaaaagcttgctgtttaggggcacctggatatcccaaccatgcgacccccgcgtccctcctcagctatgctgacgttttttgctgcgttcttggccgcgcccttggcgctggctgagtcaccgtacctggtgcgtgtggacgcagcccgcccgctgaggcctctgttgcccttctggaggagcaccggcttctgccccccactgcctcacgaccaggctgaccagtacgaccttagttgggaccagcaactgaaccttgcctacataggtgccgtacctcacagtggcattgagcaggtccggatacactggctgctggatctcatcacagccaggaagtcacctgggcagggacttatgtacaacttcacccacttggatgcattcttggaccttctcatggagaaccagcttctccctggatttgagctcatgggcagtccttctgggtacttcacggactttgatgacaagcagcaggtgtttgaatggaaggacctggtttctctcttggccaggagatacattggtaggtatgggctgacacacgtttccaagtggaactttgagacttggaatgaaccagaccaccatgactttgacaacgtgtccatgaccacacaaggcttcctgaattactatgatgcctgctctgaggggctgcgcattgccagccccactttgaagttgggtggtcctggggattccttccaccccctgccaaggtcaccaatgtgctggagcctcctgggtcactgtgccaatggaaccaacttcttcactggcgaggtgggcgtgcgtctggattacatctccctgcacaagaagggtgcaggtagctccatcgccatcctggagcaggagatggcagttgtggagcaggtccagcagctcttccctgagttcaaggatacccctatttacaatgacgaggcagaccctctggtgggctggtccctgccacaaccttggagagctgatgtgacttatgcggccctggtggtgaaggtcattgcacagcaccagaacctgctgtttgccaacagcagttcctccatgcgctatgtgctcctcagcaatgacaatgccttcctgagctaccacccgtaccctttctcccagcgcacacttactgctcgattccaggtcaacaatactcacccaccccacgtgcagttgctgcgaaagccagtactcacagtcatggggctcatggccctgttggatggagaacaactctgggcagaggtctcaaaggctggggctgtgttggacagcaatcatacagtgggtgtcctggccagcacccatcaccctgaaggctccgcagcggcctggagtaccacagtcctcatctacactagtgatgacacccacgcacaccccaaccacagtatccctgtgactcttcgcctgcgtggggtacctcctggcttggatcttgtctacatagtactctacttagacaatcaactcagcagcccctacagtgcgtggcagcacatgggccagccagtcttcccctctgcagagcagttccgacgtatgcgcatggtggaggaccccgtggctgaggcaccacgcccctttcctgctaggggccgcctgaccctacaccggaagcttccggtgccatcactcctgctggtgcatgtatgcacacgccccttgaagccacctgggcaggtcagccggctccgtgcactgcccctgacacatggacagctgattttggtctggtcagatgagcgtgtgggctccaagtgcctgtggacatatgagatccagttttcccagaaaggtgaagagtatgccccaatcaacaggaggccgtctacttttaacctctttgtgttcagcccagacacagctgtggtctctggctcctaccgagttcgagcattggattactgggcccggccaggccccttctccgaccctgtgacttacctggatgtccctgcctcatgagagccactggctcctagtgacttgtgaatctgtgctgactggtgaatggagtcaaccagtatgagctagactgccattagctaggcagctgactgtcagcttctattgttcttcccctatttccctttaaagtgtctttctctacctcagacttagggtcagtctttgtggctaagcactttataggcccagttggagtgacctttgcccaccttcctccccatgcccagctgttcaaaaagtttaaatgtgggactggaaagatggctcagtagataaagtgcttgctgtgcaggcccagggacttgtgttcagatatctagcactcatgtataggctgggcatggcaatatatgcctattgtcctagtgttggtggaagggacagagacaggccagggttccctggccttccagtctacctgaaactgcaagctccaggttcagtaagaaaccctgttttagaaaaatcaagtagagtgcttggtacacacacacacacacacacacacacacacacagagtctaaatttagtttcttgagcttctgtaatatcaaaaatgaagttatgtacttctgaaatacaatactgcacagagtaagcatcttcattccaacaggaaaaagaaatgacagggaaggatttaagtgaaacaagaccaaagcatagcaagacaaacgttaaatcctgcagctccattctcagcatcggggcccatgatcctgtgatgtgctggacagtctgtgtctgtggtgttgccatttccagccgccatgacctttctcctaggctggtgtcttgggcttcctattgattcgataaaccgcgatgaatgagcagaagcatctgggtagggaagcgttgacttcacttgtattcctacattacagtctatcatcgaaggcagtcaggcaggcacctggaggcaggaagtcatggagaggccatggaggggtgctgcttactcagactatgatcttacacatcccgggatcaccagccaaagggtgggcccccacccacaacggtctggaccctcccacatcaatcactagtttaagaaaacaggcttatctataggtcaatcttgttggggcatttttctcaattgaggttccttcttcccaaatgactctagcttgtaataaactgaaataaagccaccccaatcttgccacacattacctggcctcccaagtcttcctttgaaatctgggtggaagccaacataaccctgtcactgtaactctgatattctaccttctaagccagcatcctgtggatcacagcctactatcagcttgagtggtagttgaggactcctgggtcatccatggctacaataagcatgaagtgcctgaggcttagtcccatgcatttgtggagaatattatgatgatgatatctagtagaggggggaggctgttcacctcaaagggaacaggaagtagagtggggatagaattaagctaaatacttcttcactgacccgctttgtttaactcagccctgcatcctaaagtttctagaatctccccaaacagacctattacctggaaactacctttaaggtgtaagcctgggctgatcttaataggctgatgttcctaccttggttctggccacgggaagaaccctctctcctttagtacaaacccctggtgtgccccaccagagagcctgttggacacacgtgtccttaattcattctgcacatttttcttctctccatcagcacacagaagttcagcatacagaggtttgtgctgaaatgtaggcgtactcccaagctctccccagagtactatcacctactgtccaggaaatgagtctgagtgcagtgctcatatacactgcatggctacatccaaagtcagagttcctctgccctcatgcctcttgaagtgaacgaaatgtgatgaccttctgcagggtgttttttagtcctctgtggaccctaggctggccttggcatcttggctcacctgtcccagagttactactattaagattacaggtgtgtaccaccatgcctgccaattacctctcactttaaataaaatatgacattt

SEQ ID NO: 6 - DNA, 1932 bp, Mus musculus
  misc_feature 1..75: note = Signal Peptide
  misc_feature 76..1932: note = Intracellular Domain
  source 1..1932: mol_type = other DNA
atgcgacccccgcgtccctcctcagctatgctgacgttttttgctgcgttcttggccgcgcccttggcgctggctgagtcaccgtacctggtgcgtgtggacgcagcccgcccgctgaggcctctgttgcccttctggaggagcaccggcttctgccccccactgcctcacgaccaggctgaccagtacgaccttagttgggaccagcaactgaaccttgcctacataggtgccgtacctcacagtggcattgagcaggtccggatacactggctgctggatctcatcacagccaggaagtcacctgggcagggacttatgtacaacttcacccacttggatgcattcttggaccttctcatggagaaccagcttctccctggatttgagctcatgggcagtccttctgggtacttcacggactttgatgacaagcagcaggtgtttgaatggaaggacctggtttctctcttggccaggagatacattggtaggtatgggctgacacacgtttccaagtggaactttgagacttggaatgaaccagaccaccatgactttgacaacgtgtccatgaccacacaaggcttcctgaattactatgatgcctgctctgaggggctgcgcattgccagccccactttgaagttgggtggtcctggggattccttccaccccctgccaaggtcaccaatgtgctggagcctcctgggtcactgtgccaatggaaccaacttcttcactggcgaggtgggcgtgcgtctggattacatctccctgcacaagaagggtgcaggtagctccatcgccatcctggagcaggagatggcagttgtggagcaggtccagcagctcttccctgagttcaaggatacccctatttacaatgacgaggcagaccctctggtgggctggtccctgccacaaccttggagagctgatgtgacttatgcggccctggtggtgaaggtcattgcacagcaccagaacctgctgtttgccaacagcagttcctccatgcgctatgtgctcctcagcaatgacaatgccttcctgagctaccacccgtaccctttctcccagcgcacacttactgctcgattccaggtcaacaatactcacccaccccacgtgcagttgctgcgaaagccagtactcacagtcatggggctcatggccctgttggatggagaacaactctgggcagaggtctcaaaggctggggctgtgttggacagcaatcatacagtgggtgtcctggccagcacccatcaccctgaaggctccgcagcggcctggagtaccacagtcctcatctacactagtgatgacacccacgcacaccccaaccacagtatccctgtgactcttcgcctgcgtggggtacctcctggcttggatcttgtctacatagtactctacttagacaatcaactcagcagcccctacagtgcgtggcagcacatgggccagccagtcttcccctctgcagagcagttccgacgtatgcgcatggtggaggaccccgtggctgaggcaccacgcccctttcctgctaggggccgcctgaccctacaccggaagcttccggtgccatcactcctgctggtgcatgtatgcacacgccccttgaagccacctgggcaggtcagccggctccgtgcactgcccctgacacatggacagctgattttggtctggtcagatgagcgtgtgggctccaagtgcctgtggacatatgagatccagttttcccagaaaggtgaagagtatgccccaatcaacaggaggccgtctacttttaacctctttgtgttcagcccagacacagctgtggtctctggctcctaccgagttcgagcattggattactgggcccggccaggccccttctccgaccctgtgacttacctggatgtccctgcctcatga

SEQ ID NO: 7 - DNA, 176181 bp, synthetic construct
  misc_feature 1..176181: note = Synthetic
  misc_feature 1..88907: note = Mouse Sequence
  misc_feature 100..102: note = Start Codon
  misc_feature 18361..18547: note = Exon 2
  misc_feature 22350..22540: note = Exon 3
  misc_feature 35818..36025: note = Exon 4
  misc_feature 89946..89979: note = Lox71
  misc_feature 89980..91106: note = Inverted Mouse Sequence
  misc_feature 90381..90624: note = Exon 5 inverted
  misc_feature 91132..91165: note = Lox66
  misc_feature 91172..91203: note = Rox
  misc_feature 91204..95843: note = Neo Self-Deleting Cassette
  misc_feature 95850..95881: note = Rox
  misc_feature 95888..95913: note = I_Ceu
  misc_feature 95914..95919: note = NheI
  misc_feature 95920..176181: note = Mouse Sequence
  misc_feature 113653..113723: note = Exon 6
  misc_feature 172392..172514: note = Exon 7
  misc_feature 173631..176181: note = Exon 8
  misc_feature 173894..173896: note = Stop Codon
  source 1..176181: mol_type = other DNA
ggcccgcccaggtggatgaaatcttgctggggagcccggccgctcagttcccgattctgtcgggggtgcccgcagcacgggctctgcaggctgctaaggatgggcaagcttagcccgtgcactggcaggagccggcctggaggtcccgggccgcagctgccactcttgctgctgctgctgcagctgctgctgctgctgctgtcgccggcccgggcctccggagctacccagcctccgcatgtggtcttcgtgctggcggacgacctgggctggaacgacttgggttttcacggctcggtcatccgcacgccgcacctggatgcgctggcggccggcggcgtggtcctggacaactactacgtgcagccgctgtgcacgccctcgcggagccagctgctcaccggccgctatcaggtactaggcggcctccagccccgcgtgaccccgcgagcccgccagctcagtcggaccgcgctcgacaaccctggcttccccaggctgctgcctagggccactgcgcatgcctgacttcctcctggtggccgaaggcaggagtggctttcgttttctctaggtcagaggagagcggggtttctgggatctcgaggtgctgtgtctgtgaacccccaaagagaaggatagacgaggtcctgaggagaaaggatggagaagaaaagggaggcccaaggagctccagagggccattaaagtgagaggctgcactgggacggaccctagtgactgacgcggtgtgtcatagatcaggagtgacctacttgagccaggaggataggaagccatgtagatgggagtttcagagattaatttagaaacactaaaaagacttgggattgttgacaagggacgcatcacccgaaaagccttcagtgaatgagcgtgggggtggggtatgtgaaagatcttaagctttctctcagcccctgttgtacctgggagtcaggccacaggtgagataaggtgcaccccaggctcctatatctttcctttactaagttacccccttgcctataactatgcatatgtcaacaacgtggaaattccagcacccacgctcagatcctccgctgtgcatggctaacaatggaagtcatttccaggttctccgtacccctacaatgaaaataagggtgctgatatttcttctacctttgagggtgaatccagcccacatgagtctcttcactgcccctttagagagtatgtcccccacagagtatgtgtatgttaaatgactgggaacagtaagaacgtatcttgtagtgtttttattgtactgaaacgtttttaaaaaccactttatgaggtagttatcttgaacgccctttacaggcgaggagatagcttgcctaaattggatgtcagcgggggagtcacacggctataaattgcaatccttagtttcctgcacctactcgtctcagacctatgaaattaggctcccctcaatccaagtttggtgggtttttaaaatcctgatgtgattatgatcaaattaaatttaataacttttagtggttactgatattctctgtctctgtcctttcttccctttctccccttccttccttccttccttccttccttccttccttccttccttccttccttccttcctttctttctttctttctttctttctttctttctttctttctttctatcctacacacacagtcacagtcttctggcctttcttcatacagagatttagacaacatggtgttagtatggctctcgatacaagtcagccaaagatgtcagatagcagatactcaaggaaacacgcgttagcagtaaatataagtgtgatgcactccactgtgtaatgggttataagtgtttattcagcaagcattttgagcttactgccctcctacatatgtgtctacagaacctctcggatcaaacctcatgttctaaaaatggttccagcagtgattcaaagactgaagagagaaggtaatatttttccgagggactcagaaatatctgtaggcagagtttactgtggagctaaagcgtggtttgctctcccactagcaataagggcatcccagggaatccagcaggctgctgtgtttaatcagctagtccccaggccagagcgagtatctcccagcacacagtgggagtctccacaccactgctcctcagaagtagggtgaggtggttctgcatttgctctgaagatcaagaactggactcacgttgcaaaataatggagggtctgtttatttatgcaacatcctcctaacagacatggagagaaaaacaattcctgcatgtcatgcctcacttacaggattgattgctttaacccctaatgtgctacatctgccaaatgcttgaaaatacctgagtattggaagtaaagctgtggttaatagttaaaggaaaaagagaagttgtgtacttcaaagccatctgaggcgtctcagaggagctgactcaaacacaatctgttgcggacatcacaagatcctattaaggattactttgcttagtgatatacttttactggagtctaccaacgatcgttgctttcaaataccacatgttggtacattctcagtacctttctattgtgcttcaaaagctaattaaaacagaatggtttttatacttaagtaatttgaaactgacggcagtctcatgtttaaaatcattgtaagagctgaaagaaaatatttgggctgggcagtggtagcactcgggaggcagaagcaggagcatctgtgagttcaaggtcagcctgctctacagagttccaagacagccaaagccacacacagagagaccctggcttgaaaagccaaatacaccatattttgggtcttccaaataatcaagtattttctcccatagcaacctctttatgtttcttggagtcatagtgacttagtagtggagatagttctgaaatatccaaatatttttctttgtaatatcggtgttgttctttgaaactggcttctagtgtttttttttaaagaattatttattttttttgtttatgagtacactgtagcagtcttcaaacactagaagaaggcattggatcccattacagatggttgtgagccaccatgtggttgttgggatttgaactcaggacctccggaagagcagtcggttcttttaaccactgagccatctctccagcccctgacttctagttctcctgttatgatgttatatttatactaaagagcagtggtttgacagttttaaaagctatgttattagcactgctttataacagggtcgtgtaagctgaggctggaagaaggtagatatgttgggaggaaaggacttgggtggcaaaacacttgccttaccagcatgaggtcttgacttcagatctctagaaaccacagaaaacatcaggctggtgccacatgtctaatcacagtactggcaaaataggaggtgggtccttggaaggtcatcggccagctagactgctctctctctctctatatatatatatggtagagttcagaccaatgggagagcctgtcttaaaacaaacaagtgaaaggtgcccgagggctgacaccttaggttgtcctctggcttccacaatgggtgctgtgcatgtacataccttcacccacatttacacacacagccacatttaccattcacacagaagaaatgtgcccaaggccacagggctaagaagtgatggattgcttatgaaccaggcaatgtgctcagaatcagtatttatagcaactatatcttgtttcctccttagaagtgttaaaaacatcagcagtgtaccttcatacttaataatatctttataatgtttaaccttttagctactcttaaatatctctatctgaaaagtgaatcaaaaattgcccatgttaagtgcaaaatgggaaatgaatcttatttctgaaagaatcactcagtacaagaaaatgaacattttgttaactatttcaaagttagatacttataagaactagtcgagagtcctgtctgtgaccttggcagttgtgacggttggttctaattgtcaacttgatagtcccttgggaagccagtctcagtgagagatgcctatatcagtaaccttgtgggcagttgtcctgattgttcacaacagccactgcactggccacattccctgagtctggatcctgggctggggagatggagaaactgagctggcttggaagcatgcgttcatctctttcaagcgctcgattgtgagtgtgatgtgtgtgtttgattggttatcttaagtgcctgccttgactttcctctccagatggactgtaacttggaatttcaacctaaaatagccctttctcctcgaagttacttctttaagtcagagcatttgtcatcacagcaatagaattaaaactaggatgtcagtcacactaatgtttagagaacatctgtcaaagtaacttttatttgcctgaggtaactgttgtctccgaagcttactgcctcagcaaacctagacgcagttctggaagcttctagcctctgtacaatcttaccggggtctagaatgttttcagcctctcaagagttactgctggaaaagcaagctcaccctttcttgttctttctgagtcctggatgcccgattcaactcggttgttctggttccaaactcctcttcacacataacctggcctctggcttccctcagcttctcttgaattgctctgcttgacctcaaactaactcaggcaatgtgttctaatcttctggctccttctcattctctggctcgttctgtctttacctgtgtctagcatgtcctttcttcaacttgtctctctataactgtccctgtaaaactgcctcctttttctgtgctgctctctctctctgtctctgtctctgtctgtctgtctgtctgtctctcttttaaagaattatttatttaatgtatgtgagttcactgtagctgtctttagatataccagaagagggcatcagatctcattacagatggttgtgagccaccatgtggttgctggaatttgaactcaggacctctggaagaacagtcagtactcttaaccactgagccatatcctcatctcctggttaatggtaaatacaaaaactagacagaattcagtctctcactgaattctagtgttctccctgtgacctttattatctttaaaacctgtctatatgctttatttttaagtaggaaacatatatggtgtaaaaacctaaatctggtaagagggggtttttagttttgtctgtagtgtagtccctgatactttgtccctgttccagtaaaatcttcccactgcactttaggctagaaactctaatgaaactcagtgggtctcacacaaaaggaagtcatgagcataggaggggaactggctgagaagggctctaatgggagacagggttggggagtggtgagacattgaaaacagttaatatctgttatataaatatatgaaactgtcaagtaaaaaaaatgtaaaacctgccaagcttataaaagggcttgcattgaaacattccctctactctaaccctggtccccagtgtcttagacatttggtccccgtgtttatagggaagtatacagagaagtgttgagctgtgaatgacaggctcctcagaggtaccttgtgcctgtacatgcaaatgcatatgtacatatcccattacttttatttgaatggtagcattctcttcacatgtttgtacctatgtttaattttgctaagcacttggcagcatcacatactgtctataaatagaatcctcatttatgactacacactactttgttacctgaatgtaacatttttaaccagtcacataataataaatataaacataatttccagccttttgttgtatcaaagaagaactcagtatcttgtacacatgtccttttgttcatttgagacacgtgtgtaaaacagcttctcaaaagagtgggggggagtagggagggtcgggggacttttggggtagcattggaaatgtaaatgaagaaaatacctaattaaaaaataatgaaaaaaatcaaatttggaggggtttaaatgtagctaccatctgtaattttgataaatattattaatttgaaaattaaaacaaaatctaaattttttgcatttttattatatattttctttatttacatttcaaatgctatcccaaaagtcccctatattctcccccgactctgcttcctggccctggcattcccctgtactggggcatatgatcttcgtaagatcaagggcctttcctccccttgatggccgactagaccatcctctgctacatatgcaactagagacacagctctgggggtcgggggggaaaggtactggttagttcatattgttgttcctcctatagagttgcagacccctttagctccttaggtactttctctagctcctccattgggagccctgtgttgcatctaatagatcactgtgagcatctacttctgtatttgcctggcactggcagagcctcacaagagacagctatatcagggtcctttcagcaaaatcttgctggcatatgcaatagtgtctatgtttggtggttatatatggaatggacccccgggtggggcagtctgtgaatggtccttccttccgtctcagctccaaactttgtctctgttactccttccatgggtattttgttccccattctaagagggaagtaagtatccacactttggtcttcttgagtttcatgtgttttgcaaattgtatcttgggtattctaagtttctgggctaatattcacttatcagtgagagcatatcatatgtgttcttttgtaattgagttacctcactcaggacactatcctccagatccattcatttgcttaagaatttcataaattcattgtttttaatagcaagtagtactccattgtgtaaatttgtcacattttctgtatccattcctctgttgagggacatctgggttctttccaggttctggctattataaataagactgctatgaacatattggagcatgtgtccttattacaagttggaacatcttctgggtatatgcccaggagaggtattgctggatcttctggtagtactatgtccagttttctgaggaaccgccagactgatttccagaatggttgtaccagcttgcaatcccaccagcaatggaggagtgttcctctttctccacatccttgctagcatctgctgtcacctgaatttttgatcttagccattctgactggtgggaggtagaatctcagggttgttttgatttgcatttccttgatgattaaggatgttgaacattttttcaggtgcttctcagccatttggtattcctcagttgagaagtctttgtttagctctgtactctatttttaaatagtgttatttgactttctggagtccatattcttgagctctttatatatactagatattagtcccctatctgatttaggattggtaaagatcctttcccaatctgttggttgccattttgtcttattgactgtgtcttttgccttacagaagctttgcaattttatgaggtcccatttgttgattcttgatcttacagcacaagccattgctgttctgttcaggaattttttcccctgtgcccatatctttgaggctttccccattttctcctctataagtttcagtgtctctggttttatgtggagttctttgatccacttagacttgatctttgtacaaggagataagaatggatcaattcgcattcttctacatgataactgccagttgtgccagcaccatttgttgaaaatgttgtcttttttccactggatggttttagctcccttgtcaaagatcaagtgagcagaggtgtgtgggttcatttctgggtcttcaattctattccattgatctacctgtctgtcgctgtaccaataccatataatttttatcacaattgctctgtagtacagcttgaggtcaagcatggtgattccaccagaggttcttttattgttgagaatagtttttgctatactaggtttttttgttattccagatgaatttgcaaattgccctttctaactcagtgaagaattgagttggaattttgatggtaattgcattgaatctgtagattgcttttgtcaagatagccatttttactatattaatcctgcaaatccatgggcatgggagatctttccatcttctgagatcttctttgatttctttcttcagagacttgaagttcttatcatacagatcttccacttcctttgttagagtcacaccacggtattttatattatttgtgactattgtgttgtttccctaatttctttctcagactgtttatcctctgtgtaaagaaaggccactgatttgtttgagttaattttatatccagctacttcactgaatctgtttatcaggtttaggagttctctggtagaatttttagggttacttatctatactatcatatcatctgcaaatagtgatattttgacttcttattttccaatttgtatccctttgatctctaattgctctggctaggacttcaagcactatattgaataggtaaggaaacagtgggcagccttacctagtctctgattttagtaggattgcttcaagtttctctccatttagtttgatgttggctactggtttgctgtatattgcttttattatgtttagatatgggccttgaattcctgatctttccaatacttttatcatgaatgggtattggattttgtcaaatatttttttagcatttaaggagatgatcatatggcttttgtctttgagtttatttatatagtggattacgttgatggatttccttatattaaaccatccctgcatccctggaatgaagcatacttgatcatgatggatgatcatgatggatgatcgttttgatgtgtgcttggattcggttagcgagaattttattgagtatttttgcataaatattcataagaaaaaattggtttgaagttctctttctttgttgggtctttgtgtggtttaggtatcagagtaattgtggcttcatagaatgaattgggtagagtaccttctgtttctattttgtggaatagtttgaggagaattggaattaggtcttctttgaagttctgatagaactctgcactaaacctatctggtcctgggctttttttggttgggagactattaatgactgcttctatttctttaggggatatgggactatttatatcattaatctgatctgatttaattttggtacctagtatctgtctagaaatttgtccatttcatccaggtttttcactttcgttgagtatagccttttgtagtaggatctggtgatgttttggatttcctcatgttctgttgttatgtctccctcttcatttctgattttgttaattaggatactgtccctgtgccctctagttagtctggctaagggtttatctatctcgttgaaccagctcctggtttggttgattctttaaatagttctttttgtttccacttggttgaaaatctaaaaaattttaacacattttagttatgtgtctgtacatgcatagctgcacatgagttcagtgccagaagagggcactagatccccaggaagtggagttacagaaggttgtgagctgctatgtgtgtgctgggaaccaaacccaggttctctgcaagggcaacccgtgctcttaaccactggggcatctctttggcctcctttgcccaaatctaatcacattgcttgtctttttaatgctggtccttgttccttgtgtgttatggatagtgaaccttaaccagatggttgttggttactatcttgatagtatcctttgatatgcaacaagctttggattttatgtaatataattaatttgtttggtggtttatggttttggtataacatataaaaatcagtgtctaatattacatgtattagtctctatattttcttctgggagttttatagtttttacccttacattgaattttgtacttactctgagctcatttaaggtgtggagacatgtggacagtctagtactgcttgtagatgaatgtgtgtttctcctttatctcttcacccagagtcatcaatccattgaccatgcactctcagtttttttccatcaatctacacattcatcatgatgctaggatgtcacggtcttgatcactatagctgtataccaggttccagaataagggagtgttaattttgtcccctttattttccctgaaaggctgttttaatgattgggagcccccttgatttctacatggattttaggatcaacttgtctactttaggggcggggagagacacagatttttgacagagattgtactgatctgcagaaccacttgaaagtattccagccttaacagtggaatctttcaaccctgggactgtgccctcttcctgacatttcaggcatctataatgcctttcaacagcagttcgtggttttcaggatactgttggttaaaatttatttctacatatttcatttttgatgtcattgtgattggaattgctttcttaatttcatttccagatgtttagtgctattgtatagaaatacaagtgatatatgcacattggctattcttgggggacttggtgtgtatgtgtctgtgtatatgtatgtgtgtatatatgtgtgcgtgtgtgtgtgagactgtgtgtatgtatgtgtatgtctgtatgtgtgtctgtgtgtgggtttgtgtgtatgtgtctctgtgtgcgtgtgtgtgtgtgtgtgtgtgtgtgtgtgtgtgtgagactgtgtgtatgtatgtgtatgtctgtatgtgtgtctgtgtgtgggtttgtgtgtgtgtctctgtgtgtgtatgtggtgtgtatgtttgtgtgtgtatgtgcatatgtgtatgtgtggtgtgggtatgtgtctatgtgtatgtatgtatgtgtgtgtgtgatcttaaggtttcctggattagcacttttcttgcttgcttctttcatagtatttcctttcctcattgctcaggctagaacctttagtgtgctttgagtggtgtttgtcttgttcaagcttgtggtccatcaccatgaaatttgatgtgtattcagtcctttgtttaactggtgtctgtggagcactgttgagccaggtgctgtgcatgattgtcggggtctccaggtgctttagtctggtggaggtgaggtcaggggtgactgagagggagtgaaatagcgcacgtaagtagtgcacaaaaatagtgcacataaatgaggaaggaaggaagcaagcttaagggcatggcaataagggttgaaaatagagtgggtgaagtagggacgctgagaatgtccccaaggaggcaagagtgacagaggcctcctcaatgccacagtcaaggtcctgcaaagagtctaacaagctatgggaggaacaagggaaactggcccccgaggctggattcagcttgttctaagactgagaaggtggtggtaggaactgagggggttgaagggccagggagaggcacaaaggaaggctaagtctccctggacctaatgcttcctcttcaagataaaaatgttaagtcttgtagcacaagcctttaatcccagcactcgggaggcagaggcaggcggatttctgagttcttggccagcctggtctacaaagtgagttccaggacagccagagctacacagagaaaccctgtctggaaaaaaaaccaaaaacaaaaaacaaaaaaaaagttaagccttcaactctggttgtttctgtctccatagtactgttatactttggatattatatcctaaagaatgtatccagtttaacactgttttacacaagtgtatttcaaggagctataatcaacttccatgtggcgtcctttgtcttgctgtatagccttggctggcctggaactcattatgtatccctggctggccttgaactcacagatctggggtctctgtctcaagagtgctgggattaaaggctgtattgccacagctcagtattcttattttaaaaaatgtgtcttggaaatgtgtgcagaagttcctaatgtaacgactgtttttcctgtccctctcttcttccatgaggcagcacctctttattagtttcttagtgatgccatagggaatattattttatattcatttgtccttggttcaaacttttcatctttcttaatagaatatctagactgttttaattgaaacaaataacttgaaaattttcaaattctaacaatttgactcgactcactgtacaatattcattacatgtctgcattcccagtacattttttttacatttaaattttattttatgttttacatgtatgggagttttgcctgcaaatatgttatgtgccaagtttatgtttggtgcctgtggaggcagaagacagcatcatattccctggaactggagttgtagatggttgtgagccatgtggggactgggaagtgaacctgggttctttggataagcaaccagtactcaaaaccactgagccactcctccaggatccaatatgtgtgtgtgtgtgtgtgtatacatatatatatatatgtatgtatgtatatatgtgtgtgtgtgtgtgtatatatatatatatatacatatatacatatatatatgtatatatatactttaaaaagttgattcattttatgtgtacaaatgttttgcctgggtgtgaggacactgctggtaaccccagctcttgagaggctgaggtagagggatcatgagtttgagtcaggtacatagagagtacaaggccagcctgactacaaagacttgtcgcaagcagcaagcaagcaagcaagcaagcaaggactcgtgatgtagctcaatggtagaatccttgcttttttcttaaagatatttttgaaaaggccaggtgtgttggtccacacctttaatctttgcgagtttgaggccagcctagtctacagctagttctacatagggagaccttatctctctctctctctctctctctctctctctctctctctctctctcacacacacacacacacacacacacacacacacacacacacacacacacacacacaaaggacggaagaaagaagaaagacgaaaaggtaataaaattggtaggtctttgtgaaaacactaagtaactctttttagtccccccatggggactgaggaggtcactcaacaccagaattctataaaccttggcagagaagacaatgaaagatgatgctgactttccttcctaagggacctcagccacatttttcttaatcatattgataaatagaccagccactttcagggcctttcactcacccctgaggcagaaccttgagcaggaaatatgggggagaagctgtgaagttcagggcaggatattcttgacttgtgcttcaagtttacctctagactgtcaggagacatgtgcagaggaagggggcctctgggcaggatgcttcttcctactatggaatcactagctgctgttcctgcttgtcctcagcctctggcctggacccaccaaccttggtggaattgaattgggttaaacagaggaggagctgggagaaagtgggaagagaggaaagcttcaggcgaggccatgtgatgttgttggaagagtcacagggtcttctggctcaaatgtgcaaggaggaagaggtcagagcagccaggaagacatcctgtggtctgtgctatcatgttatcacctatgcaacatcactgtgctcatctaaggtggggacacaggatgcatcaggcttagaagagcagcagggggcagcagtcaagcatgtgtctccaacacaaggtccttgccaccaagcctgctaacctgagctcagtccttaaactcgacatggtgggaggagagcgccaacttctgcaaggtgtcctctgatcttcacatgtgtgaaatggtgcacacatgtccacacacaaacacatgcatacacatacccactctcatacatacaaatacatacatataccacacacacacacacacacaaaatgtaataagcaatttctaattgaaaaaaaatctgtttatacactgttgctttctggtcgtcaccagcatcattgactttgcttctttaatcgtatcactttactaaaaattctgttttcagatttctttatattttttccttaatcaatctctattggattcataatttagatagaggaagtgatggaaactatttctgccttgttcattctttttacaaacaacatcgctttgtggggttagtcacaggcccgcactctttactaatcaacaccaaaataaataggcccttaaaactgtcagtggtatgggccagttgtgaagctggggcacggaggggctgagccagatggccaggccaggctcctaagacacaatgtgtgttctgtagctcttggctacagcaccctgggcagctgagtgctgtcagaaagcttcatgtggaagggaacagattgcccactctctatttgttctgtgggcatctccaggaataaactgtaggatggtacaagggttttctgaccctgactgaacctactggagaccggcaaaaacacaggctgggagttctgtaacccctggctggtcactgccacatcctgtgactgtgttctagtccagaaacttcctttcaggctctctgcctggtgtgtaaagtacaggggcaagtctgttcacttctctgaacttgccagtgatgtagctagcaggtgctgtctcacaaacatgggttcatgttgcatggaggttatgtgttcaacttgcataggctggtagaccagatggagcttccctcctgctccaccaggtgttaacccaccactgcgtagggtgtgagagagagagagagagagagagagagagagagagaaatggcatccactaccaagtatgattcagtggttcattgaacccctggtagggcctctaagagtggctagaatgtgtagagtgtgatgtcctgagcgcctgagatactgtcttagtcagaatttctatcactgtgatgagacctcatgaccaaaaagcaatttggggaggaaagggtttatttggcttacacagacacatcatagtccattattgaagggaatcagaacaggaattcaaacaggacaggaacctggaagcaggggctgatgcagaggtcatggaggggtaccgcttgctgacttgctctcatgacttgctcagcctactttcttatagaacccaggaccaccagcccagtgatagtaccactcacagtgggctgggccctttccccatcaatcactaagaaagtgccttaaaggcttatccacagcctcatcttatgaaggcattttctcagttgaggttccgtcctcttagattactttagcttgtgccaagttgacataaaactagctagcatagacatagtcagtatgctgcatgggcgtgtgagaggggaaagaagagcctctgaccttagagccatcgtcttctccatcacaggacgaggtagttagatttggttttctttttctcttttaaactaatgagagtgtattgcagccatcttctaggtctttagaggaaagactaaagatttctgccactcatctcattgaaagcaagacgctccctggggtttggagacctttgccatcaaaggggcaaatcctcaatggtcaagtgcaaactttggaggggggtgtttttacaagaggatttgttttgatgaagaagagacagccacacaaaacagattgagcagtagccccaatggactttgatagatcacagctataccttttctatttacaccttctctctgggcgttaacaatgagttttggatggacttgtagacttttcttgtggttaaatagctgccctttctttgatttgcatttgtaccccacgacagcccatcccatacactgtggggtgaccccagagttctctgctggagtgaaacaagcttggcacttgcctgtttactgcatctcaacacattagagctccctggcttcaaatagtgtttgaacagaccaaaaacacatttttggctgtcatccagagtttggcttctgcttcccaataaatgccataaaaacgttctgtccaataaattctcaggaactaaaaagaacaaatctcctgttttgtatgatcggagagaatggagacaggtttcagctgaccccctggcgtgctgcccgtggcacaggaaaaccgaatcgcacagtatctcttggcagtgctttcaagtgatcagagataattctctgcacgtgacagatgagccctccacatgagttttgcatgtttatatccactggtgcctttggggtccatgaaatattacctttatatccttctcaattgtatattagtatatgttataaagtgtttgagccttggctcaattttttgtttattaagcttgtagtgctagcaatgggaagaattcctctttgtgtgtatgaacatgtttgtatgtgtgtgcccatgtgtttatgcatgtgtgtatatgtgagtgcagaggggcttttccctagaaatgataaaatccctcccattccgaggtgcgtccagaaagagatggcatattcaaattagagtattcaatcagggtatattagaaagggttcatttgcaaaggtgactttatttcagaagatgtgaatgtgagcaggggcagaaagcgtagtggagaggaacagcagagcggttaccacccctagaccagtaaggggggatggaagggataagatgacctagaaggcagaggcacgtggggatgcagccttcaaagtggccgtcagtacagacacataggtgtccaggctgaagcaactccaccccagggctgctctttctctcccatctctcttctctctgctgagtgattccccactgactgagctcaattcaagccagagttagatcaacaggatctttgttttggcttccagagacagaacatgaacctaggaaggtgcctagaaggtctctgggacatccccactgtgtgcccagttagtgctgagagaggagtctctacagaagtagacttttattgtaaacagcttcattgacatgactaacacgtaataaactgcacagactctaagcatggaagtcgatccactttgatgtgtaactgtacctgtgagaccatggtagtgagtttatcatactttagcatttaaggcagcccatgggcttcttctgcagtcattgcatcattgcatcatgggcacaccctccccccacgtagataagattaaaaaataatgaaaattaaagaaaactgagccaaatgcaagtctgtgagtctatgtggtttgactagtcagcaatttaagtttgagaaaatcagtgctaaccgtgcatttagttagttccagtggaactgtagatttgaagttccagtgtgcactgtatttgatagtcatatacaaaacacatactgggaagtggctcaagagggtgagagatctctggaaggctgtggtctccgaggaagcagagcattgggagggaggaagatgatggtgaagcttggtggctagcttgatatactggagaagagggaacctcagccgactcattgcctccactggcctgtggggccattttcttaattgctaattggtgtagcattggtccttctgtggacagtgccatccttagacaggtggccctagacctctgtaagaaaggtagctgaacaagcctgagaaagcagccaggaagtggtgtttgtctgtggcctctgcttccgttcctgcctcagcaccactccgggacagactatagtcagtctgtgagcaaaataaactcccaagcaccagtcagtggaatgctttttagaaaaggccagtgtcttttcagattatggtttatgcaaagttgagtaagaaacacaagccaccagtttcgtcgtactgttaaataagactttccaaaaaactaccaagtcctcaaagaatagagatgtttcttctaacagatttcaacttttacatgcagtggttttggaatcctttcctttgataaaataaattattggttcctggtgtagtatttgataaatatttgttgaaaatattggtttattgaaatggttttattcatacgttcaaattcgatttgtatcactgaggaatcggcttttcagaatacgcctaagcatccagacccgcagatctgtcccgtgacttaggcggctactttattttctccttcgtgctatatcacgggcactaatccccagttttgtgtttatctctttaagatccatttgggcttacagcattacctcatcatgacctgtcagcccagctgtgttcccctagacgaaaaactcctgccccagcttttaaaggaagcaggctatgctacgcacatggtcgggaaatggcacctggggatgtaccggaaagaatgtctgccgacacgccgaggattcgatacctacttcggtaatggacatgcacacatttctttaacaacacagatctactacagccagctcataaaataacacccaagtatcatcaaacaaaatgaccagaaacctgaacacagtaaatcaggcagcaccatagtggagctgctttcggctgttatccccataagccagctctgtgctgagcgtactctgggcatgcgcgcccacagcaagacgggggggggggggggggggcttagccagagcgctaaggaagagtgttagggacatttatgtcagagaccactgtgcgctctagaatgttcttacctatattgaagttcacatattttccccctatggactgtgttctccaggggaagactagctcaccttacctgggcatcttctcccacctaggagctctgcttccaaaattactaggttggagaagatcgatttaaaaaaattaataacaacaacagaaaaaatggtacaaggaactaaccaaacaataacaagagaaccctctgaaataaatatgaaacctgaagtttgttttaaaacatgacactttaagcctattgtaaactctgccttaatttagttaggttattctaattaaggcagagtttacaataggcttaaagtgccactaactgtgtatctttctgttagggtctttttctattgagctatatttctgcccagctacttagtaaccttcctcctgccatctgcttcttccaaactgaatgcgtacttaacataaagcatctaaatagaataacacaattggagcaaccagtaagacatgctataatttaaatgcactatagatgcatggctctgggagcactccacatctaagatgggagacttcttatgttggaaaggaagagggagggagggagggaggaggaggagggaggaggagggagggaagaatatgcaggagtgtgtatcacaagggtacagtaggtattagggaagagcaaagcttcttccagttcgcagcagtcagaggaacttcccctttgggagaaggtaaaggggtgggggtgggggtagggtctcggtgcttaactctaataaaaaagtgatggctttcttgtagattgtttttaggaatctgtttccaagcaaggtaaggccaaattcagtgcaaaggagcggatctgcatctgccctgaacccatgcggccaagcacttagccctaaagctgaggtcaagatgcaaagaagtcagccaggagagcatgtgtgtccctctccacccgtggcattgcagcaccactggccagccgtgacattatttctagctgagtctaaataagtcttcagtgtccttgaatggctgttagaaatcagccttcactgattaacatcttcgaagatctagaggaatggcctgtgccttgggaacttttttcatgcaggatgaattgatatctgtcctctgatagactgtggatatttagaatctttattaaaatccaagttgcatgcttagcagcctaggtggttggacaggggggcaagagctcactcagtacagtagttgcagcagtgaccttgatttgatccctagaacctgagtaaaaaaagctgggtatcatctaagctttgagtccaggctccaggctcaaggacagtggaggtgggggcatccctggggctcactgtccaggcagcttagcctaaatgccaaaccaggagagaacatgtctccaaaaacaatgggaatagctcctggcaatgatgtcagggttgtcctttgaccaatgcacatgtgcacacacacacacacacacacacacacactaaaaactttacataaagggcagaagtcatattcttgtatgagaattaaggttcaccctggacctggatagacaaatacccacatttgttatttgtctatactggtttggccaagtatttgagttctagctctacagttcttctatttttaatatcatttaatatttatggttcctataaccaaacatatcctgtgcctatatcttccccagtgatagtttatattaatggaaaggagtgtgaagtgttctctccaaattctaatactaagtagatgttaaaaacccaaactactggcttgatcactctaatcaccaaggtaaggttgaggtagttatttgtgtgtgtgtgtgtgtgtgtgtgtgtgcgcgcgcgcgcgcgtgcgtgcgcgtgcgtgtgcgtgagagagagagagagagagagagggggagggagagagagagaacacaaacgtgtagaggtctgagtcaggacagctttcaggagtccgttctcttcttcctctgtgtggatcgcagggatcagactaaggttgttaggtttggtggcaagcacctttcctcattgagccatctcaccagccctgaaattattttttttgtgaatacaattttttctattccatattaagtagtaaatatgttggatttatttcctataaatatagataaaatcacacaataagttatgttgatgtcatatactaattatattcaggaccttgaacttatttgatcatgaaaaatagttaatctaaaatcaattgaattattacataagctgtataagactctttaattgtcactgtatacaaaattcatgagaaaggaaagagctaggcccatttttcatcattttaagactaaaagggaatatatttaagaatatagctaagagctcatcaaagtttatttctttttaatagctttattagggtataattcatatactatacagtttacccaattaacgtatttaatttagcgatttttaaacaatgtgagagattgtgccattatcaccacaattcagttgtaggaaaccacacacacacacacacacacacacacacacacacatgtatgtcacaaaaagaaaccaaatcccatgagcagtcatcacgggcctccaggcaaccagagccctgggccatccgtcactaaccactttctgccctctgttgattggccttttctgagcaagtctgtcaatttaatcataatatgcagcccagcttattttcacattttcaaaacacgatcacttgcagaacaacgattagttggggcgtttctgtttctcctgtgctttcctctttgttatgggatctgggctctagaaacaggggagttgacaggccactgggctcagtaagcactgcatctctgagcagcggggcaaggttcacagtctagacagaatgctgctctttgatctctggggctgctcagctgggatagagagcttgtattaggaaaggtttatatttttccaccagtgggtgtcagcatttgactaaatataactccggcaaaggccccgtccataaataaccacagaaatccatctcccaacctcagtagcaacaaatgacacgatctgaaccctgtttttagtattttacaagtaaaaccttgtaacacattagtggtgcgttatcttttttcttaggcaattttaaagaattagcatctggttgcttcctgaacttaaactctgatttctaaaaaccttttcccacagatcaaccatgtataaagagttgacaagcgagaacagatgctctaaaagactcaagtgaggaagggccttggatttccatgtagtgccatttcagtggtgtctctaacaaatatagagatgttaagaagagaaccctgattagccctgtcatttgattagcctcgtcatgggcaatcagttgcattaggcaattaactgctggaacattcgtttgcctaacaagctttctgccatgccgactgtttcttctcccattcttcttgcaggatacctcctaggcagtgaagactattacacccacgaggcctgtgcgccgattgagtctttgaatggtacccgctgtgcgcttgacttaagagatggtgaagaacctgcaaaagagtataacaatatttactcaacaaacatatttaccaaaagggctacaaccgtcatagctaaccacccaccggagaaagtaaggcttcctcctttaatattgtcaaaatcttgttgcttccaagggagtgtgtgtgtgtgtgtgtgtgtgtgtgtgtgtgtgtaatataacattttagagcatgttccagttagccagaaagggaaggttgttagaagtgaagaatttggatcttcctcaggtctgggagaaagtacttaggaacgcccaagagatgagtctcacaggaagggaccctgggctgcagatggaggaaggctgtctgtccttcagcatttcagtggaaaccctgctcactcttatgatgctttatgtgtgtgcacagtaagtggttagcaaaatcaggcttcaggattccagacaggtgtctgtgctcgaggcagggctccgttgggaagaagtgttgggaactcaggggctagagaaaatcctctcattctatatttttctcttcaggattattttggttagtcttaatcttttgtatccccatgctaattttagagtaggttgaccaatttttactaagaaaacagaagttggctgtttgattggttggtattcactgaccaacttaatggaaatgaccgtcttagcaatactgggtttttacaattaatatgcatggtatattggtttttacagacaccataggcgcctatcaggtatgtcacgtgcagacttagctgcaggtaggaagagagaagagttgtgagaagtcttaaatgcaaattgtctggattcagcacataggtgctttgggaacagagcagatttttgtgttgtgagacactgggctcaaagcgtgtccttatgaagaattgtattagcacactcacaaaaattggccttcagtgggacatggaaaatttgagaaagtgtccaggtccttccagttctctgcactttgtctctttgacgatgcgtgaaccctcagcaggcagggttctggcttgtgtatctgttcagacttagtgacctgctaatgactctgtctgctacggaatcttccaagctctgtcttctatactctcagtcagtatgagggattctccctggtggctgttctcagttttgccatactttaggtacttaagagctgacatcgtcacctgacatctctaggtaactatgtctgccatgaaacatgaagaaaggggagcattctctcaaatgtttagaaacctgcacattttaagtctagatttaaaaccagaatggttggtgggctaggaaggtggcttcatataacattaaatggataagaagatgcaactggggtgaaatagttctgtggggagggggagttataagctgggggctgtggggaaaggcttgaaaccaaggacaacaggaggccctaagagcccgtgcaccacaaagaggtattgttagcaatggtgcctcttgctggctgtattatagctcttaattgtatgtgaggcattttatggatatggcctaataccaagaaagccaaagtaaggctttcagggaactctttattatcctttgatagaaggatagaagacacgctgtttgtttaagcaaacaggcttggagaaatgaagtgacttgttcaaagccacgggactgtgtgaagtcagagtcaggatgtaacctctcactttggactccaagagcatctgcctttattcgccatccctagtcacagctcgtgcagagatgttgaatcccagttcatattcagctccacagtcccggtcttgacagcatattaggacctcctgggacatttggaagaaatagtgatatcagatattgtaaggcattaatatttcatccccttatcagtgattctccgtggtgtccatggtgccgctatggagatcctgtgcactcaggatggttccgtgagtgttagcttgatgctctcacaagtacaaagacaagcagatgccagcttgctggtattacgggctcacaatctgatctaatcatgcaactctatgcagcagagataagctgtgcacaatacaaagttattcttactgcctggagatgctcagcacacacaagtcttaatgagcgttctgcttgtctacgtgttcagacacagtgacctgccagtgactccttgtctgtttagaaccttccaggctccatctttgctattttactcagtttgaggaatcttccctagtgactgttctcatctcccctggtgactggtctcggctttgccacactttggatttttaagggtgtaatgctgacatctctaggcaactatgtctgccatgaaccatgaagaaggggagcaatctctcagatatttagggatgtgtacaaaacagtattgtctcctggtgccctcataccaccaagcagctaccaggaagcgtctgtggagaagtggttccttgtgggtgggcagttaaactgggctggtggagaaggcaccagaaccgaggacagtcacaggccttaagagctcacatcccatgagaggggtgctgttaacatggcactgctcatagatagcgttaccaaaatcaccagatgggagatggacatttcctgccagcgcgtgggatgctctgaagaggtaatcagcatgctcagagcccccaagcacagactaaagtaaaagaaagaatagtcatgtagcaacccagccgtttccacaaggcagctcctgcacacagatgctcccggcttcagctctccagacagtgatgcgactcactggcttcaggagctgcatctttgtaacatctttccccaggatttaacctaattctgtgctaggctctcaggtgcctagagcatcatgtgtagattgtaacatgacatttgttctaagatggaagtcattcaaagaattcacaggaagtgttcaccaaccaactaacgtgtacttgcttttaaggggcagctgagggagaaaatcgacagagctgccgtgtaacagttgagctgttgattctggggacgctgctaatggctttacatgtgtcaggaagggacatcctttctcctttatgtgagggtgactcacatagtagtagcactataaaaagaaagtcatatattcatagcatgactttctgttaaaattagaacagcagcactttgaagaacttaaaaaaacaaagaaccctctacatctaatctactagaagcttcctaaggaaaacaaaacaataaatcctagtggaagactttctttgtgtgagtacaagctgggaagaaatgtcttaatttggttgtcaaagatagaatagtagtttaaaaatgtattcctgtttttccaatttatactttgatttagggagccctctaaagacataaaaatgagtgatatgtggtttcttcccatagtgcggatgtttagagttcagatcttaggagccatggagcagaacagaaaagggaaaagatccattagcatcctcaatgtacgtatgcagagttaagtctgggttttatgtgatactatagtgtctagacacgctttccaaaccaggattccattttatagtcttaggatacttgaaagggtcacagttagggttggggtacagttggcagctatgactgagctgatcggaataagagtttgaaatcaagaaaataccaaggacataccaggttctaagaaacagaaatcaaagctgggtagtggtggtgcacgcctttaatcccagcacttgggaggcagaggcaggcggatttctgagttcgaggccagcctggtctacagagtgagttccaggacagccagggctacacagagaaaaaccctgtctcaaaaacaaaacaaaacaaaacaaaacaaaacaaaacaaaacaaaacaaaacaaacaaaacaaaacaaccagaaatcagtggaggttaatgtggggcaggacttcagtgtgaatcaggagtcagtgaggtgagaaggggtctctctccaaggccaaggacctcatgtccatagatacacatacaatccccagatgaaggctgtttgctttggccagtggggagaaactggctacagcttttctctgggaggaccccaccaactagtgactgcaggtatggtcctgatggtggttggagaaccttctagccttagataatcattcttttcatgaggctaccatgcagcacagactaccagtctcccctccctccatcatttaaaattagtacagtggggctggagacatggctgactgattaaggacactggctgctcttgcagaagacctggttcagttcccagcgcccacatggtagctcacaactgtttgtaactccagttccaggggagctgatgccctcttctgacctctctgggtactgcatgcacatggtgcacagacatatatgcaggcaaaacactcatatatatgctatcgtaatgcttctacttggtgaggttggagaatgggttgtccatggatgaaattcaccttctgagtgctaaagacttgatttatagtagtgatataaatatacaaaatggctgaatgtggtatcacacacctttaacccaagcactgggaaggcagaggtaggtggatctctgtgagttctaggccagccaggccacatagagagaccctgtctcaaacaataaaacaaagtgggtgtcggagagcatattaaatgtgtttgattggtcctaacctcatgaaatggattggacacagctcttggtgacccagagctacgcaatatatggaattgttcaccccacagcaaagtgctctggactgctcaaatgaactggaagaaaagacaactttgccgggctgtggtggcgcatgtctttaatcccagcactcaggaggcagaggcaggcagatttctgagttcgaggccagcctggtctacagagtgagttccaggacagccaggactacacagagaaaccctgtctcgaaaaaacaaaacaaaacaaaaaagacaactttttgttgttgtctttcaaagaacacttgcatctcttcttgtgaattatgacgttatgatcaggtcagcaaacagtgtgaggctctcacatatgacagtcacctgactggccagcttcaacttgatccagagggaccccagagtgtcaaatggccagtctgggtagcgtggaaagtgtgtgtgtgtgtgtgtgtgtgtgtgtgtgtgtgtgtgtgtgtgtgtgtgtgtgtggaggagcagaggcagggtcagaagtgttgatatagactttaagaggaggaacttgaaatacttttcatggaaaaagtgtacatttaattttaacatttaattcaaaatgtctgaactccagataaacgtaagagtatctcttagagctccctgtctggacagtccccactcttatcatatcttttcattccccgtaactggttggcacacactccagcaaagggttgtgtaatttagaacaatttgcaacaataaaaagtgaagtgagtttcttccttctgtcttttttccttcatttatgatttaaatacctcacataaatgtgcttattcttggatcaaagctattgattattgtctctttgagggtattaaacatatgagaaattctatacggcatggtgcagggctatctgcagagaggcccctaaggagaagggctgacctggaataccacaagtgctgactgttctaagctggcatagagaaaaaccagaacctgtggctcacacttcttatttctaggaattaaattggcatcacatttatttggttcaatatcaaaatctaacaaaacactgtttccccagaaaacatgttaaagaaaaccctgtacactctctttatttttagctcacttatctgttggtgcatggcaacattgtaacacggagggtaccaggagggaagcctgcatcaaacagtggcacctgggcatacctaaccttttaaagccttggttaactcatttgaaaaatggatataacaggatggttttgagtgttaaatgagatagagtagtcagattattatcagagggttttcttttttttttttccattttttattaggtatttagctcatttacatttccaatgctataccaaaagtcccccatatccacccacccccactcccctgcccacccactccccctttttggccctggtgttcccctgtactggggcatataaagtttgcaagtccaatgggcctctctttgcagtgatggccgactaggccatcttttgatatatatgcagctagagtcaagagctccggggtactggttagttcataatgttgttccacctatagggttgcagatccctttagctccttggctactttctctagctcctccattgggagccctatgatccatccattagctgactgtgagcatccacttctgtgtttgctaggccccggcatagtctcacaagagacagctacatctgggtcctttcaataaaatcttgctagtgtatgcaatggtgtcagcgtttggatgctgattatggggtggatccctggatatggcagtctctacatggtccatcctttcatctcagctccaaactttgtctctgtaactccttccatgggtgttttgttcccaaatctaaggaggggcatagtgtccacacttcagtcttcattcttcttgagtttcatgtgtttagcaaattatatcttatatcttgggaatcctaggtttggggctaatatccacttatcagtgagtacatattgtgtgagtttctttgtgaatgtgttacctcactcaggatgatgccctccaggtccatccatttggctaggaatttcataaattcattctttttaatagctgagtagtactccattgagtagatgtaccacattttctgtatccattcctctgttgaggagcatctaggttctttccagcttctggctattataaataaggctgctatgaacatagtggagcatgggtccttcttaccagttggggcatcttctggatatatgcccaggagaggtattgctggatcctccggtagtactatgtccagttttctgaggaaccgccagactgatttccagagtggttgtacaagcctgcactcccaccaacaatggaggagtgttcctctttctccacatccacgccagcatctgctgtcacctgaatttttgatcttagccattctgactggtgtgaggtggaatctcagggttgttttaatttgcatttccctgatgattaaggatgttgaacattttttcaggtgcttctctgccattcggtattcctcaggtgagaattctttgttcagttctgagccccattttttaatggggttatttgattttctgaagtccaccttcttgagttctttatatatgttggatattagtcccctatctgatttaggataggtaaagatcctttcccaatctgttggtggtctttttgtcttattgacggtgtcttttgccttgcagaaactttggagtttcattaggtcccatttgtcaattctcgatcttacagcacaagccattgctgttctgttcaggaatttttcccctgtgcccatatcttcaaggcttttccccactttctcctctataagtttcagtgtctctggttttatgtgaagttccttgatccacttagatttgaccttagtacaaggagataagtatggatcaattcgcattcttctacacgataacaaccagttgtgccagcaccaattgttgaaaatgctgtctttcttccactggatagttttagctcccttgtcgaagatcaagtgaccataggtgtgtgggttcatttctgggtcttcaattctattccattggtctacttgtctgtctctataccagtaccatgcagtttttatcacaattgctctgtagtaaagctttaggtctggcatggtgattccgccagaagttcttttatccttgagaagactttttgctatcctaggttttttgttattccagacaaatttgcaaattgctccttccaattcgttgaagaattgagttggaattttgatggggattgcattgaatctgtagattgcttttggcaagatagccatttttacaatgttgatcctgccaatccatgagcatgggagatctttccatcttctgaaatcttctttaatttctttcttcagagatttgaagtttttatcatacagatctttcacttccttagttagagtcacgccaagatattttatattatttgtgactattgagaagggtgttgtttccctaatttctttctcagcctgtttattctttgtatagagaaaggccattgatttgtttgagtttattttatatccagctacttcaccgaagctgtttatcaggtttaggagttctctggtagaatttttagggtcacttatatatactatcatatcatctgcaaaaagtgatattttgacttcctcttttccaatttgtatccccttgatctccttttgttgtcgaattgctctggctaatacttcaagtactatgttgaaaaggtagggagaaagtgggcagccttgtctagtccctgattttagtgggattgcttccagcttctctccatttactttgatgttggctactggtttgctgtagattgcttttatcatgtttaggtatgggccttgaattcctgatctttccaaaacttttatcatgaatgggtgttggatcttgtcaaatgctttttctgcatctaacgagatgatcatgtggtttttgtctttgagtttgtttatataatggattacattgatggattttcgtatattaaaccatccccgcatccctggaataaaacctacttggtcaggatggatgattgctttaatgtgttcttggattcggttagcgagaattttattgaggatttttgcatcgatattcataagagaaattggtctgaagttctctatctttgttgggtctttctgtggtttaggaatcagagtaatagtggcttcataaaatgagttgggtagagtaccttctacttctattttgtgaaatagtttgtgcagaactggaattagatcttctttgaaggtctgatagaactctgcactaaacccatctggtcctgggctttttttggttgggagactattaataactgcttctatttctttaggtgatatgggactgtttagatgatcaacttgatcctgattcaactttggtacctggtatctgtctagaaatttgtccatttcgtccaggttttccagttttgttgagtatagccttttgtagaaggatctgatggtgttttggatttcttcaggatctgttgttatgtctcccttttcatttatgattttgttaattaggattttgtccctgtgccctttagtgagtctagctaagggtttatctatcttgttgattttctcaaagaaccaactcctcgtttggttaattctttgaatagttcttcttgtttccacttggttgatttcacccctgagtttgattatttcctgccgtctactcctcttgggtgaatttgcttcctttttttctagggcttttagatgtgttgtcaagctgctagtatgtgctgtctcccgtttcttcttggaggcactcagagctatgagtttccctcttagaaatgctttcattgtgtcccataggtttgggtacgttgtggcttcattttcattaaactctaaaaagtctttaatttctttctttattccttccttgaccaaggtatcattgagaagagtgttattcagtttccacgtgaatgttggctttccattatttatgttgtaattgaagatcagtcttaggccatggtggtctgacaggatacatgggacaatttctatatttttgtatctattgaggcctgttttgtgaccaattatatggtcaattttggagaaggtcccgtgaggtgctgagaagaaggtatatccttttgttttaggataaaatgttctgtagatatctgtcaggtccatttgtttcataacttctgttagtttcactgtgtccctgtttagtttctgtttccacgatctgtcctttgaagaaagtggtgtgttgaagtctcccactattattgtgtgaggtgcaatgtatgctttgagctttactaaagtgtctctaacgaatgtggctgcccttgcatttggtgcatagatattcagaattgagagttcctcttggaggattttacctttgatgagtatgaagtgttcctccttgtcttttttgataactttgggttggaagtcgattttatccgatattaaaatggctactccagcttgtttcttcagtccatttgcttggaaaattgttttccagcctttcactctgaggtagtgtctgtctttttccctgagatgggtttcctgtaagcagcagaatgttgtgtcctgtttgtgtagccagtctgtaagtctatgtctttttattggggaattgagtccattgatattaagagatattaaggaaaagtaattgttgcttccttttatttttgttgttagagttggcattctgttcttgtggctgtcttctttttggtttgttgaatgattactttcttggttgttctagggcgtgatttccgtccttgtattgcttcttttctgttattatcctttgaagggctggattcgtggaaagatattgtgtgaatttggttttgtcgtggaatactttggtttctccatctatggtaattgagagtttggccgggtatagtagcctgggctggcatttgtgttctcttagtgtctgtataacatctgtccaggctcttctggctttcatagtctctggtgaaaagtttggtgtaattctgataggccttcctttatatgttacttgacctttctcccttactgcttttaatattctatctttatttagtgcatttgttgttctgattattatgtgtcgggaggaatttcttttctggtccagtctatttggagttctgtaggcttcttgtatgatcatgggcatctctttttttatgtttgggaagttttcttctattattttgttgaagatattagctggccctttaagttgaaaaatcttcattctcatcaattcctattatccgtaggtttggtcttctcattgtgtcctgcattacctggatgttttgagttaggatccttttgcattttgtattttctttgactgttgtgtcgatgttctctatggaatcttctgcacctgagattctctcttccatttcttgtattctgttgctgatgctcgcatctatggttccagatctctttcctagggtttctatctccagcgttgcctcgctttgggttttctttattgtgtctacttccccttttatttctaatatggttttgttcatttccatcacctgtttggatgtgttttcctgtttttctttaatgatttctacctgtttggctgtgttttcctgcttttctgtaagggcctgtaactctttagcagtgctctcctgtaattctttaagtgacttatgaaagtccttcttgatgtcctctatcatcatcatgagaaatgtttttaaatctgggtctagattttcggttgtgttggggtgcccaggactaggtggggtgggagtgctgcgttctgatgatggtgagtggtcttgatttctgttagtaggattcttatgtttgcctttcgccatctggtaatctctgaagctagctgttttagttgtcactgttaagagcttgttcttcaggtgtctctgttagcctctataagcagacctggagggtagcactctccttagtttcagtgggcagagtattttctgcaggcaagctttcttcttgcagggcaggtacccagatatctggtgttcaaaccagactcctggcagaagttgtgttccactcactagaggtcttaggatctcgtgtggaatcctgtgtgggcccttgcgggtgttgggcaagactctgctggcaaggtagcccggggctcgagtggggtggaaggggtttgtgccccagatcaagcccgggtagcctgcttccctatgtaccgcagtctcaggttccgtgcgattggattggggcaggcgctgtgttccactcaccagaggtcttaggatcccgtggggagtcccgtgtgggcccttgcgggtgttgggcaagactctgctggcaaggttgctcggggctcgagtcgagcggaagggacttgtgccccagatcaggcccgggtagcctgcttccctatcgagggttttcaatataaacgtttcaatatgtggtgggtcaaagccttctgccccattctaggactttgaccttcatgttttgttttgggtcttgtcatcttttgaacatatttactgagacataatttgcatatcataaaatccactcacttaaagtattcaattaactggaaatttaagaggcatctgatcatcaccatgatctagttttaaaacttctcaccactcttgaaagaaatttctacctagtagtagtcccttgtcatccttttccccagaattccccaaaggcacagatatccactcacctccttcctgtctccatggacttgcctctttggacttcagaatgttttaatcaatgcaacaatgcaaaatgtggtctctggctcctttctcttcacgattctaaaggccagctgtgttgtcactgattatttagttggtatatactgtgattaaaaaatattctgaattttatttttgcatccatcaactatgagcattgaggctaattcttggccattatgaacaatgttgcagtgagcatcccatgagcgccctgtgcatttcagaccggcatgtgctttcctggtgttctaggtgtgggagggccttgctgtatggtagctgtgtgtgatactaaggaacttcatgctgatttttcagtgcctgtctatattactttgcattcctactaactaatttctccatagcttcgtcaacatttttgctttctattttaaggactctaagcatcctaatgagtgcgatgcggtgatatcttactgtagtttttgtttgcagtcccctgtgtgtgaatatttgttacaaatcatctttggagaaatgcctatttaaattctctgtaccttttattgttgaattatttatatactctggctacgagctccttatcatacataggattcagagatagttaggtccactctgtagattgtcttcacagctattgatatgaactgagaatctcggctgtctcatgtgctgtgtttaaagcttccgttccttttaaccgacatttggttttcaaattctctttgcagccactgttcctctaccttgctttccagtctgtccacgatcccctgcaggtccctgaggagtacatggagccatatggcttcatccaagataagcacagacgtatttatgcagggatggtgtccctcatggatgaagcagtggggaacgtcaccaaagccttgaaaagccacgggctctggaacaacacggtcttcatcttctccacaggtcagttcaccagttcgggaaatccgtctctggtaaaccctaggatgtgtcattcagtaggtagaatgaagacagactggagaagtttagcatttgccccggaaataaatgccaagtgctgtagtggagcctcggtcacagtgtgaacaaggaaggagagctgcaaacctttcctccttttgtttgtattttataacacaccgggagtgtacctggagacctggactcactaactgagtgagttagcaggcaccacatatccacagggcaccaggatggcagctcctcaggtgctggtcaccacagccctctgctgtggctgcatgactgctgctaactaaagtctgtgtcctggcagagacaggttggggcactgtaaagccagattaggaaaggagcaaactaagcttagtctagagtctccaggtgtaagctttttttttttttttttggcattaaaattgttttctgatgacacacattcaatagaaaaagtaagagagaggaaaaaaaaacagtgaaagaaaaataaaaccctctgtggccagagatggttggagatcaccttcacgtagtcaggctaccagagatgagtcttctaacattcttagtttcttgttctgttttccttacatttcttttattgcttggaaaatttacttaccagtctttcctaaactttgtgttgaattcatctcaatcactgtttttataagtcactgagagctcttagttcctgataactcctttttttttttttgctttatagatgtaaaaagtttgatgtgagttcgaggtcagcctgggctatacagagaaaccctgtctcggacccccacacccccaaaaaagtttgatgtgtgtgaatgtacttgatatatgtaggatacatatatctgtatatatccttaaagtttgctgtgttgacaatattatctaagtttttccctagtatctttgtatttttgcttacgtcagtatttcaaaacctcagctaacaccaacctggcagtctcatgcgagaaatcagagctattgttcagcaagttttactgaaatgtcacagtgtaggggtgaggccacatggagaggagtcatcttgctggtctcatggttggttttggtgtcctgttgttttgctttgcttttaattaagtatagctatcaaatctagtgggtttaagcacttactgtatacaagacaattttaggagcctcgaatggttacgtttaacagccctcactactagtaatccatccctgaggactgtctcccccccccccccccccatcttgcagacctgagaactagatacaaagaaacatttagccctgggtcacatagccacatttgggcattgtctggatttgtgtttcagactcttctgtggcattttctagcctcaaggatggcagtctgtttggttatttgagacaggatctggttgccctatagtcaagccaatctgaattctcagtcctcctgccacagcctctgcagtgctggcattatatgagttcaaccccacccctggtgagagctgtttctatggtgggctgcagtgatgggctactaaggacccaggcagggtgggttactgagcagcttgtatagttgctttagtgccatctaaatactctcattttctaagtgctccctgtattgataaggcttgaatgtgatgatttttttcacacaaaaaaaaaaaaaaaaaaaaaaacgcccaaacaaacaaaaaaagaagacatcttagattaattctttacagagtcttataatcttggcgtcagcctcagtttatttcatttaaaaagaaaaaaaaaaacaaccttctatagtgtttttgatcagggttggtgttgaaggccttgtagagtctctgcagacaatgaacaaaaaggaggtcaggacgcttaatacagatttagaaattattcttgaaaatgccagcataatcgcaaaaacttgaagactttaaatgaaaaaatccaagcctctgttgaaggcatcatgattgcacagtgtctggacagtgtctttctgaggatggtttagtatgttactcaggaactaaaaagggctcagaagtgaagatgttcactctggaaactgttttgtttttgtttttgttttataagaagggcaatggcagccgggcggtggtgacacacgcttttaatcccagcacttgggagacagaggcagccggatttctgagttctaggccagcctggtctacagagtgagttccaggacagccagggctacacagagaaatcctgtctcgaaaaagtaaaaaaaagaaaaaaaaaaagggcaatggcaagtggtaactggatttctttcttttttaaaaattttgattagatattttcttcatttacatttcaaatgctgtcccctttcctagtttcctctccgaaagtcccctatacccaccttgctccccaacccacccactcccgattcctggccctggtgttcccctgtactggggcatataaagtttgcaataccaagggacatctcttcccaatgatggccaactaggccatcttctgctacatatgcagctagagacatgagctctgggggtactggttagttcatattgttgttcctcttatagggttgcagatccctttagctccttgggtgctttctctagctccttcattgggggtcctgtgatccatccaataactgactgtgagcatccacttctgtattttccaggtactggcatagcctcacaggagatagctatatcagggttctgtcagcaaaatctttctggcatagtgtctgggttggtggttgtttatgggatggatccctgggtggggcagtctctggatggtccttcttccgtctcagctccgaattttgtctctgtaacttcttccatgggtattttgttccccattctaagaaggaagtaagtatccatactttggtcttccttcttcttgagtttcatgtattttgcaaattgtatcttgggtattctgagcttctgggctaatatccacttatcagtgagtgtatatcatgtgtgttcttttgtgattgggttaccttactcaggatgatatcctctagatccatccatttgcctaagaatttaataaattcattgtttttaatagctgagtagtactccattgtgtaagtttaccacattttctgtatccattcctctgttgagggacatctgggttctttccagcttctggctattataaataagaccgctataaacatagtggagcatgtgtccttattacaagttggaacatcttcttggtatatgcccaggagaggtattgtgggatctactttggaaactgataactatctcaaagtgattctcacgggaatacagacattggtatcaagaatgtctgggaaaagatgggataattttttctcatgatatgtgagaatgaaaaaatatttgaagatcaatgtttcttttgttccatgatctcagatttgtgtgcatattttaaatcattttataaacatctgtagcattttattcaatttggcaaaaataatatttgaggcttctcactgaaagcatggtggttagctgacactagaggtgtctcctgccctgagactctgatggcttagcaggtgctaaggtcttgggtcgcctttgctctgttgggggcagttggattatgactgtgtgcttgtataatgttcccaatttgatttagtggagtttttgttaggatttttacatcagtccacaagtgagagtggagctggtttcctttataccggcaggctctgttgtcttggttaaattcatgtggtaaaataattaggatgttttccatgtctcgttctatggtttgagttagtaggcgatccttagaactttctttgagggcattttaaaagttatctccagagtttaagtcttctccttactcatgtctggatgtgaggcgtccggtgttgtaaacatggatgaagcctgagatccggtgactcctgtgattgcaccgccacgggattcttctttcccgtaagatttctgtgtctgcccgcgtttcagctcattgcctttattctgtttgacttatgggaaaaccagaccttaacaggatgacttgctaatttagcctcttttcttatcttatttctttctggctttctgtcctttcccccggtccccccaccccaccccccactcctctgcgccaccagctgacagacagtcttgccattttgatcagcccttcagtgaccgggtggaggtgattgtgactgtatctttagcatctctgcagtccgctttccttggcctcggtgccctcctcactgaatttcacggtagacaggattttcactgttacagcttgactgcatgcccagcccccctctattcatttcctccacttgcttatggtgtaaatgggacaacttgaggttatcctgtgagctggttcccagtccccattttatcaaagaaggaacccaaacttcaagaagctacaaggttagcctcatgtcagacacacaagagagtcagaattcaaactcggatctcctggagtcaatatctaactgctaatcagttgtcctcttcagctcatctcgtggtctttcatctctccttagcttcctcagcatctgttcccaaagccagccttcccccaaatcttttaaaggagaattctagaatctttgtttttatgtcaaatcattgccagctgtctattctttctctgaatgtgagtgatatgggggtctagaaagactacacagcacgtgtggccaattctatcccacatctgtgtcttgtcttgtggtcaggtgatgcacacagcttactgagttaccaggactggagtgaagtgtgttccaccttgcagaagccatttgaccaagttcatttccttctcttgtggccaccagttcttctgccaaccaaaagcaccttgagtgtagtgacctggctctacccagctctgccccgttaacgttttacttttgcatatggcccaggagacgagacctcttagctatgtatagaagggtaaagaggtaatgactctttggttgtgcacaaaattatcactcccaggttttctcttgcctcagttcaggtaggtggagaagctgctgtccagagaccaaggagtgtgtgggtcagccctgttggccttaaaagttggggaacagtttcaagattctagcattctctcactgtcttcccagtgtcatgtcctgagctatgatgtgattccagccttctctgtttgtttttagctagatattggctaaaggaagacgtgctaggaggataagatggtcactagatgacacacaccctcccccccacacacattacagctcatctttttagctgctaaactccaggagtctgtacaaaattcagttccaagtaaggctactcaaaagtgacgcccttttctggtttctgtgggcactgtactcacatggtgtagtcacatgcaggcaaaaatccatattcataaggtaaaaataaacaatttttttcttaaagttaaggctacaagcttgaatttaaacattgtgttcttcatgccacactgatataaattaccattggctgattcacgtcatcctggtatgaatttagtttgtttgtttgttttctgtgctggggtgaaatcaggagtttcacacatggtgtagccagcttaccgcttggctacagccccaccttatccatcctttctgcaatatgggatggattttactgtaagcaaatattgcttgtctcattacacgtggaccattgtgttctttatatagcagtgacccttttgtccttctttgatagcatgtgatcagagtttgggtcctcctattcctagggatattgatagcttgatagcgtgcagtctgcagtgcttgggcaatcttgacagagattggggagcatttgcagagagctgtcaaagggtgcagcctgtgacgtgctctggcacacatgtagtctgtgaggcagtaggttcgcaggctgtgggttcatagtgcactcgggttgtagacctgaggaatttggaatgtgtggggtgggcctgggccgttctgactttacagtgaagttgccattcactgaggggctctgaggtgctcgggtctgcgcttacatggtggagaaagttcttatccatgatgtcagtggcaccttaaacaccagaacctgtccattttttttatgcaggattcccttcaggatgggtagctgacagtagcatagagtgctgttccatagctttaagtatgctgtacagttggcagatttataaaatagcataggactcttgctaagaacaagccgtctgcctgctagccagctctagacctgtaagtgaatgtctcacaaaactgagaactgttaactgaataaaccaggtcacactgcacaccactgctcaccttgctgtgacatatgcatccaacacatgtctgacaaagagagaatatcagtgagtaagtgggttggacctgtgagaccggagtgacctgtccttgagccagctattgatccatgctatctcttgagatgttgcgtattagtgtctgcacaaagagcgtgttgggtcacttgaaacttttactcataaggggtgttcacttactgatgactacactgagggaaaatgatagccaatgtactttaagggctctagaccagtcttgcttttagtgtctctgtgacaacccactgaatcctcgatctgtttctacggaaaggacgcctctcaactcttacgtttatagattgccagtgttttattatattacttaataggtgcaagaatatcacatcgttgatattttgaatttttgatttgtgtaacatgagataatgaacattctcacacttctgtgggcagatagtaccgtggcctttttgagttcattattaatggaagagggtattgaactgggcacatttattgactaaattgcaggaagctttctaattgtttcgagttattttctccgctccctttgtgtttcattttaaaggtcacagttatgatggctctgtttctgactagtcccacaacttcctgtggcttcagctccctctgaggccagaggggtcttcggttgcacaagcttcacaggaagttgagtgaggatgaaggtagattatagagagtggaatgagaacctagaaagcgcaggtgtacaaagtaaagccacggcgcatgcgccacgccgtgccgttcacggttgtctggtctgttcacatctgtgtgtcctccagtaacagcctcagcaagtgtttccagaggttactcctatcaatcaggctaatcgataacatataactgtccactctgcaaagcagtgttacttggacaatgtgttgcttggacaaggtagtcttgtccaaacatgactgcaaggatgagctgataacaagattctacttcggaggaaccaagtaaagttaggaactagttcagaaaggttctggtgaaccgcagctcggaggaacccttgagatgagtgcgagcggcagctgctgtgagagtaaccagcagttgttggggtgccgccttctttctgccagtcagggccccagcccgtgggtggtgtcgcctctgttcagagtgtcctccctccttggttagaaggacactggtcaacactactcagaggcgtgattctgaatccgtgtcaggtggagaatggaaactgtgtcccttgtcagctccatcaatcatgtccctttaaattataacattgtgtccctgtcctctgaaagagtcacgtgctgacccctgatttacacataaaaaagtttcaagttctgcctccaagagcttaagacaagccatccaaccaacctgctagtagtatatgacttttttttttattagaaaaagtatttgcttttattagtgtttataaagcatccagagtaggataaagtttatcatttatgactatcattttcatttttttccattttttaattaggtatttagctcatttacatttccaatgctatatcaaaagtcccccatacccacccaaccccactcccctacccacccactccccctttttggccctggcgttcccctgtactggggcatataaagtttgcaagtccaatgggcctctctttgcagtgatggccgactaggccatcttttgatacttatggagctagagacaagagctccggggtactgcttagttcatattgttgttccacctatagggttgcagttccctttagttccttgggtgctttctctagttcctccattgggggccctgtggtccattcaatagctgactgtgagcatccacttctgtgtttgctaggccctggcatagtctcttcttaatttaagaaaattattttgtcgctaggctgtggtggtgcacgcctttaatcccagcacttgggaggcagaggcaggtgggttactgagtttgaggccagcctggtctacagagtgagttccaggacagccagggctatacagagaaaccctgtcttgacaaaaccaaaaaaaaaaaaaaaaaaggaagttattttgtccctccctgactccagttgtcactaatggaaatgcacatgagcagtatagaggccagtgttggtagccagaggaagaaagggccaggtaacagtagtttattattagttagcagaaagtggatgggtgggaggtgccctgggtctggagtctttaaacagagtatcataggtaaaggaaacatttaagtctcaaggggacagcaaactggtgttcgaatgacaaaaggcttcatactgtttaccttcatcctttccatagtataaaaatggacatttgtttactctgtagttttgtggtattttttttcccctaagggagaaaactgagagcgtctaaattttcgctgctgaagcatccaaacagctatgttcttccccatttggctatgtacatgtagaattctccctgagggcagtggtaagggctgtatatgtgtgtgtcataaagcctttgctcctaacgtgagagagctccagggctagctcatggtgagcgtgtcccagatccctctcctctgtgggcttcgccccgaggccactgtggctgcctactgtgcctcaagcctgctgagggaagtccacagcccctgcctccgcaggttatcagccgctcctccctgatgagagggcctgggaaccagggctgaggctgggctctgccctgctggacttgttatcctttcttttctctcttcattctctgctttcagaagcatcagatcccccctccaggactaaagcaataaggaacgtatttgcaagcatccccggttgcttctcttgctgactttggcacttgagtacatgcaacaaccaactctggacacaaaaatgctgccttccaggcttggttcctctcctgcagagcaaccctaacctcacagggctcttgtcttctgttttcttaatgagaaaatagtttagggattattggcgctgcaggtttactcttttcttgtgttttcactcttaatcatctgcagtctctatgatctcatgtcttcttgtttcagtatggctacatctaaccaacaactcaatagtgggggtgggggtgggggtggggggagatggctcagcaggcaatggctgctctcccagaggacctatgtttggatttccttcctaccttccctccttccctccctccctccttccctccctccttccttccatccctccttgcttccctccctccttccttccctccctccttccttccctccctcctttttccctcccttcttccttccctctctccttccttccctccttcctttcctctctccctccttccctccctccctcctaccctccctccctccttccttccctccctcctttttccctccctccttcctccccttcctccctccttccttccctctctccttccttccctccttccttccctctctccctccttccctccctccctcctaccctccctccctccttccttccctccctcctgttttccctccctccttccttccttccctccttccttccctccctccctccttccttccctccctccttccttccctccctccctccctccttcattcctccctcccttcttccttccctccctctttccttccatcccttcctatccatgaagcactttccacctcatttgtgtaggacttttttttttaagagttgttttcaaaagttaacaaaccttaaaagtagcatcagtgatgtggaaactgtcacatacctgcactctctgctgttagttcagcctatgaccgaatgacatattcagatatgaatttatcaaatcatgaatgaggtgggactgaggagaatggagcacatgtctgggaatggaggccacatggtgtcacctaaacttcacactggtgtcactctaggttaagaagtcctctctaagtccagcagtagtaataaagcaggctgggtggtggggtgctttgtgcacacagtatttcaggtcacatctctgtgtccttgaagggtgtgtcctgcctggcttctgtgaacaggttgtcatcagactgtttttcctaaatacccatcctgtcctttgttggtaataagaatttatagttaaagggcatggatctgtgattttagttaatacaaggagccagttccgtcatcagtgagatagagcctctgcctgtggaggacctagcatagtgctggtctggggcataagcatcactccaggccacgggaaccttttcccctgtctgaggctaaagggagaggagggacagagccacgttggccccttttgccagcatggtgctgactgaagaacccaggaatgttgcgcagtggatatagtgtacacatttgaaatttaacttcacacttacatggaatccattccaggataagaggcagtcgagaatgatgaagtttggggaagagactggccatcagcctggcttatggaaaggtgggatccaaattaggctgtgttcacaatcactaagctggaaggaggcaaataacaaagagacaggagtatggatgtgtgcacacacaaggacacgggaagagggaagcaaagcacttcttggcatggcgaccaggacttggtgctctcagctgcacacagctccacggtgtagacgagacacaccctccagggctcttcatctggcttgaatgtataagaggggatttgggggctgtttcagaattgcagtgaattgtggtggggaagacacagaggattagttcctggtgaccacagtagcctaggaaggaaagaagcagggacagggacgggtgccaccttcagagacccgcctccatcagcaggtgtcggccagccaggtcccacctcctaaaggctccacagctcccccaaataatgctaccagctacagaccaagtgttcaaaatatgagcggattggggatatttcagatgcaataagatgtacctattatatatttcagcattttttcctttggggtgtttcaaatataactatctcttttgtaaataaaaacctcaattgtggtgaggttattaaaagctccaaggaaccagtggcagaaatggtttggaattttaagtggcttctagtctagatattacattcatggttgtcttaattcaggtttctgttggtgtggtacaactctgtgaaaagagagtgttcaattgggtgtatggtttcagagggttagagtccatgatggtggaacaaaggcatggtggcaggaacagctgagagctcacatctgagtctgcagcagaaggcagggggtgggaggagaagaaagacagagagacagagacagaatgagaatatatatactgggcatagtgtgagtcctttgaaaccttgaagcccgcctccaacaagaccacacctcctaatccttcccaagtagttccaccaaccaggtccacgtgttcaaatataggaacctatgagaaccgtgcacattcaatcccacagcagtctggcatgtgtgtgtaagaactaaaatgtcttttgtttcctgtggagcgtactcttctgagaactgaaaagactcacttttagatagatctattttccttaagttctgtgctggctctttagcagtatatttacaaaatacctgaaagtaaaaggaggtaaataatttgttgatcttggtccttcttaccaccctcaacagttaaaacaaaaccaaacccagtttgtcatcctcctgtctttcccccagctaagcccaaagtcatatgactttccttgtgttctcatcgctctgccagctcatatgcttcaggaatttaatcacctgtattgctgcctatgattgaaaagcaatggcatgtactttttctgagggaatgtatttccatttttcctggacagccacccttttgttgatattttagcaaggcttgggaccttaattgattgtaaggcttcagcaagatcacttgttacgcccagtacagaaactgtgttcctgtgggttagtgaacaagtcttgtgaccatcggctggagatcctgcagagcgctctaaatgagaaaccagcaagcatgggtcatgataatgagttgttccatggctgcagatccaggaaggagcagacataaacagccttttccgtgcagacaagcagccagccagccaaggtgtttccttaagtgtggaggattgaaaaatggatggaacctggagtggatagtttaccacatgtaaaataatcaccatgtatgaatacagtatgtgaggagtaagaaacacattttggaaaagaacagtgattttacatgttgtcattgaggacagcatcttacttttagagtccatggtgttatctcagccagagttagccttgttccctgaagcagatcgctgccctgtccatccctcgcccacccacctcttttctattcttggctttgggtatacattgcacttcatagagaacacggtactcaacccagactttgtcctaacacaaggaaattctattacatcttaatccaggaagatggcccaagccaactgaatggtggaacaatataatatacctgaaaaattccaggcccagtcagtataacattctctggaaaatcttattaacagtacactcaactccttggcatgctggggaaggagagagggtgggcagccaggtcctagtaaagtcatggacataaggctgagagacagcagggattctggacgcagagaaacatgagctcaaatcctcatcctgctgcctgctaatctgtgtctctgtggccagtccttttctcaatatgagtttcttcaaaatggaactcagacttaccaggacttctgtaagaatccaatgaaagaattcatctaaaacacctggaagggaacctggcagaagtaggaatttcacaaatgaggctgtgatgactgtctgcactttctaggctttggcctttttgcctggtcagagggaacactgaagcagtagcctctgggtggggcatcttagtgcagaatactgcgtgtgcgttccgaaggtccgggttgaaggaatctagctgtcccatggacagagaccagcgtcccctgggggagtggttgataaggtctgtccagacttcagaaactcattttcaggtcaatgaacaacttatttagacactgtagtaaggaaaaggtttttctgtaagagagacagaagggaaaattgtagactctatgagtgcttgtggtactcagagctgaacctctgtgctgaagtcctcagactcggcagctatgcatggcttgaacagacagaagccctgattaccagcattacattaaaatactacagaggttcttaaaactattcaatacttgctttctggctttaatccttcctcagaacgttaagtcatagttgtccatttctcacatggaaaaaaaaaagtggccttgggagatggcaccatccacctgaaatcaaccccctcacattctctgcagacacagaacacacccatcctcacgacattccatttcccattgtcttttgagtatcaagaaacccagtgttattgggactccaaagccagatgtggttgtcactaactattccaggtggcacagtgccacttgattcaaaacaattgcatccagcagtcccaggctttcgtttgtagctctgagtatcttggaggcaccaatatggcaggtgcctccaggtgtcactgggttccttaagttcctctcttgctgcagctgcttccccctgggcatccaagacctgtccctggatctacgtgtcctctgacactggaggacttacatgcaccacctagatgtgcagggagccagtctccacggggccagccttactcattggcaactagccggttcatgcttctctcagtgagagttctgaaagctgctcagtggactcagggtcatggtaagactgtcatcagtcatctgtgacagtggccaactaggatgacatcacatccgtgtgctgcgtcttccttttcccctgtttgtccccagctgctcactcctactctctgggatcacttccaaaataaactacctgcctgcacactttcagctgaagcaaaactagcacccaaaagcatttacccataaccacgtttacactaacttccttcatcgtcaccaatctggggagcttaagaagttaacagcttagttttatagatgaagaaattgagccccagaaaggttaagttattccccaggttcatacaacttgctggagatagatgtgcgaacagaattcctctggtattttggctgcttgtcttctgaacatgctaaccattccatcacttccttggtcacatgctggctgtgaagctgggctgtcagtacacagagaatcagtgatgacaaaatttgtcctaagaagtgcgaatgctatgtgctttctgcatacgtcagtacgcatggaaaacagaattgacggaggctgttgctctgcagaatgagaggacagagcaaggtgatacccagacgatgcagtggtggtcggctagggaatgtgcgctgggaagaaactaggatttggtgagggtcattaaagcatagtggacagatggtgtgattgaagggctgactaagatgatgtcctggaccattactgtctaataggaatgcaatgtagatcattaacgtgagccacagatgcaatcttacataccaaagttaaaaaaccagagagccaggtgaaattaaatttagcaatatattttttatccagtatatcaaaaaaaatcaccactccaacatgaattcagcatcaatagctatcaaggagaattttgccttttttttttaaaaataaaacccatgcattttatacagacaacacatttcagtttaaattcactacatttcgagtactcaatagccacacacaatggccagtattttgttcaattcagttctgcaggaagtgagctggaaggctggtcagtggtcatcagaaaatgttgctagaaacagtttgggggtgggggagtgtttaaaacttaattggtatggattgttatggcagagtggaagatgagctcacccaaggagaagccaagctttttgaagggtcatctttggacagatgagatgtgttgataatgaaatgtagaattgtgagggctggcaggatggattggcacatcaaggtactgccaccaaacttgatgaccagagttcaactcctgaaacagtatatactgtggtatgtgcacacacattcacacagattgtatgtgcatgtgtgcctactcacacacataactaatggtttttttccatttaaacatttttatatatgtttatatcttttttcttcatttttttaattggatattttctttatttacatttcaaatgttatccccattcctggtttcccctctgaaaactccctcccccatttcctctctccctccccctgctcaccaacccacccactcctgcttcctggccctggtattcccctacattggggcatctatagagccttcacaggaccaaggacctctcctcccactgatgtccgactaggccatcctctgctacttatgcagctggagccatgagtcccaccatgtgtactctttggttggtggtttagtccctgggagctctgggggtactggtgggttcatattgttgttcttcctatggggctgcaaaccccttcagctccttaggtcctttctctagctcctccattgggtaccctaagctcagtccaatggttggctgtgagcatccacttctgtatttgccaggcactggcaaaacctctcaggggacagctatatcaggctcctgtcagcaagcaagcatttgttggcatccacagtagtgtctgggtttggtgattgtatatggggtagatccccagatggagcaggctctggatggtcatttcttcagtctctactccacactttgtctttataactccttccatgggtattttgttcccccttttaagaaggaccaaagtatccacactttggtcttccttcttgagtctcatgtggtctgtgaattgtatcttgggtattccgagcttctgggctaatatccacttattagtgagtgcatttcatgtgtgttcttttgtgattggtttacctcactcgggatgatattttccagctccatctatttgcctaagaatttcataaattcattctttttaatagctgactccattgtgtaaatataccacattttctgtatccattcctctgttgagggacatctgggctctttccagcttctggctattataaataaggctgctatgaacatagtggagcatgtgtccttactacatgttggaacatcttctgggtatatgcccaggagtggtattgctgggtcctcaggtagtcctgtgtccaattttctgagcaaccaccaaactgatttccagagtggttgtgccagcttgcaatcccaccagcacagaggggtgttcctctttctccacatcctcgccagcatctgctgtcacctgaggttttgatcttagccattctgactggtgggaggtagaatctcaggactgttttgattttcatttccctgatgactattgatgttaaacttttttttttttttaggtgcttctcagccattcagtattcctcagttgagaattctttgtttagctctgtaccccatttttaatagggttatttgtttctctggagtctaacttcttgagttctttgtatatattggatattagccctctattggatttaggattgctaaagatcttctcccaatctgttggttgctgttttgtcttatcgacagtgccctttgcctttacagaagctttacaatttcatgaggtcccatttgttgattcttgatcttacacacaagacattggtattctgttcaggaattattcctctgtgcccatatgttcgaggctcttccccactttctcctctttaagtttcagtgtctatgattttatgtggagctccttgatccacttggacttgagcttaagaatggatgaattagcattcttctacatgttaaccgccagttgagccagcaccatttgttgaaaatgctgtctttttttccactgcaagcagactttgtggtcaccttgttgaaaaacaaaaaaaaaaaccttgatttttgggctcctacagatacatagaactcttttaaacgtaagggaactctccataccttccactaattagcagatacgcattgcatctatgcaaccaccccgcagatgacacaatccagtttgacatctgcagagcactggggctgtatgttagctgtggcagtccctccatgtctgggacccatcaatacattgcaaaccactgacattgggactggacaggcatctagtgggataagggctgtgaggtcctacagcttgacctatcagggatgtcacaggctaccggcacatagtgggtggtgatggtgtcatattgacctgctatataagattgcagtaggcatccctgcgagggtatttgagctctccctgcctccccccttctctttctcccagactaaagcacagggtttgttgcttatgtcccagatcggttctaccccaactgaaggagatctcatacctatggaggatcctgaagcttgtttgactcggctctttctctactgaagccaaacgtctcctattggtgctctcatgtagcagagaaagagtaattagcagaaccatcaacaggggactgaagcgcagaaactgcttaggtgcttcacacttctgtgaaaacccaattagcactcttttacggttgtaatttttaattactgtttaagttgagaaaaatgtattcgctaattagataattactgggtagtgaccttttgatttaaaaaaattgcttcgagtctgaaattgtctcaagaagaattgtttaatttaataaatcactgctgctttgatgtcatagaaaatctaacactgagaaaggtctcaaatctgctaaatttccagagacccagactcccaaccacatggaattccagcttcaggtgatccagtgccctcctctggcctctgagggaacctgcacacatgtgcctcatggttttgtttggttcttttcctcccccctccctccttcccacctcccttcttccccctctcaaacacacacatttcttcataaaaggaaaggctgtgaggagcttgcttataattccagcactcagggggttgaagtgggaggattgggtctaccaggccagcctttgttaagaggaagtctgtttcaaaaataaggtgtgtgtttgtagggagtggggcttgtggggaagaacagaaaaggatagaagaaaaggaaggaaggaaggaaggaagggagggagggagggagggagggagggagggaggaaggaaggaaggaaggaaggaaggaaggaaggaaggaggaaggaaggaaggaaggagcggggatgtaagtctatcagtacagtgtttgattagcatgcatgaggcccttggtttgatccccaacattgcatgaactagatatggcagccaattcccgcaaataggtaaagagagaagggtcagaaattcaaggtcatccttggattcatagtgtgtttgagggtagtctgggctacataagatagggtctccaaagagaaaaaaaattaaaattaaaagaaaagaaagattttctcccctgaggtgatgattggtatctgatcctataatttgatgagtatgagtgacagcctactcaggctgcttcttgttctttgctgtagtcgtgtagtttttaggatatgacaaatgatataactttatagggaaactcctggcttgtgatttctttcgtgtgtaaatatttatatatgtgaatatgcatgtgtgtgaatatttatatatgtgaatatgcatgtgtgtgtgttcatgtgtgtaatgaagttaagtctttcctctttaaaaaaaaaacaaaaacaaaacccaacaactacaggactgattactgtgtggtattagttacatatagaatgcttagttgcgatatggaagatattacttctatttcttaatccagtttctacatttgagctgagctttgagttaattctattcagggttaagggactgtgtcttgttgctgccggcagcatgaggaagtatgggaagagtttgagttgtatcttttggcttgtttccagatactttgatttaagatgatccagttttgactttccttatcttgatggtttaatatgccacctgtatatacaactgcagccacagcaaggacttctggggtgtgtcctagcacataaataagcaaattccagtgagattaagcaagtgtgtgggatagataccaaagagaaggatgatgaccacagcctgacccacagtgtccctgtgccttctttcgaagggccatttagcttgagttagaggtaggttatggggcttttgttttttgttttgttttgttttgttgttgtttttttgtttttacaacagaaaacaattagaaatatagttaatacagtttccaagttaaaagaaacttgggtatgatatatgtactatctgatgccaccaacttgagccccttcctgtctggaactctctgcacgctgaccttgctgagactgagtgcttattgtatgtgtcccctccctccctgttctgcaagtctaacccacactgctgtgttaggttttgtcccacacccagcacaggaggtgctcttcatgattcatggtctccttcccttgtttaacaccaatttctttcagcagaattatgctcactgggaagagggaccttgcctgtctcggtcaccaccaagacattgtttaatgacagagctctgaaaacatggtttttgtcattctcttaaacaaaaagaaggaacaaaaaggtactcactcatttctcctttagttgtaaattaataccaatgaataatgaatgctttcagatttttagatcaccagattagactctttaataaaccacatttattttgttactttatgtatatgagtgttttgtctgcatacatatatatgtattacgaatgtgattggtgccctggaggttagaagatgccattgaatcccctcggaatgaagttatagatggttgtgagctgcagtgtgggtgctgggaattgaatctgtgtcttctgcaaaagtaactgctcttaattgctgagccagctctctagacccaactcagtcgttttagctataatgtccactgttaaaagaaatccttactgtctcttaattaacttcatttaaaaactatctcattaatctcaccagattactcatattcctgatttaaaaaccaacccatgattgaagaagaaaggtaaaaactattgaaaggataaagaggaaaatataaattatgaactgtgttattcttgagaagaacatttaaactcatgtgagaaagatttaacaaaatagaaaaaggcccagtgatgtggtaagatgggtcatcctgccaagccaggtctccaagtttatttgtaaaaataaactcacatgaagttctcatttgtgtttgatcatagtataggagaagcttgagaaccaaatgagtaatagcttgcattgtccaacaggacagaaagcactgagtccacctagatgtctacgtttgttagtgactcacccgtactctgaaacttgctgcaaattaaatgcattctatgtgtgcagtgagaggcctccaagcctgagtgcctgagccccatccccaggacccacatggtcgttgtctcttacccttcacgagcatgctgtggcacacacatttgcctcaccagcaatggaataaatcagtacacataagcattgtttaaaagtccaaaatctcattcaaacaaacatcattcccattgtaccctgtggctagcttggaaaagtgttggggacggtgacatcactctggctggccggggtgctcttctctaagtccttaccttctatagctgatcaggcttttagtctctctctctccctctctctccctctctctccctctctccctctccccctccccctccccttctctatcccctccccctcctcccctctctctctgtgtctgtctgtctgtctttctgtctatgtaattataatagtgcatttcttcttttttaattaaaaactatattatgtgcatggctgtttgcctgagtgtatgtacatacatcatgtgtgttctggtgctcaaggagtctagaagaagctatcagatcccctggcactggagtttgtaaggtaccatgtaggtgctgggaatccagctcaagtcctctgtgagaacagcaagcactcttaactaccaaggtagctctcctacccctgctcatctctttaattcctgaggttatttctttttatttctttttttaaagatatatactgtagctgtcttcagacactccagaagagggcgccagatctcgttagggatgattgttgaaccattatgtggtttctgggatttgaattcaggacctttggaagagcagtcagtgctcttaactgctcagccatctctccagcccccctgaggttatttcttcagcaatctgccttaaaaataatttcagagggttgggaaatggccctgtggatgaagaacttgctctttaagtgtgagaactaagtttggattctagcatgctactatggcctttctgtcatcccagtgctcagaggcagagacaaaaagatctctggagcaaactggcaatctaggttagccaattctgtgggttctagactcagtgagagacccccacctcagtaaataaagtagggagtgattgaggaagacacccaatgtcaacctgtggacaggcacatacacatgtatgcacacaaatgcacccaaacacagacacatgtgtacactcacagcatgcacatgtacacatgcaaaagtcatttctaattgcatgtttgttttctggccagaaaatagaaatagacagtattgttacgaatccatcgcaagaggacaaggttcggtgccttagccaagtggctcaaggtctcccagatgtctctactccgtcctcactagctacggcattgtgttgtccagctgcagggactctcaccttttccctactttagtctgtgttgtactattttacccacctgctgtgctggtaaacctgaaaccattgcagcaaaaaccgcttatttgatcttccctaaaatattctgtctctttttacctcctgtagataaagccaacaggtccttttcctgctagccaagacctgtaatgagagccaggtggaagatacagctttccagtgtagttttcatgctcactgagtctcacgtagtctgcaagaaactatgggcctcccccttggctccatggctgcacttttctcctggtcagcccctgtcagagtgatgtggtgataacgtcaccacagggccacagacagcctgctggaaagggagcaggagtgtgggcctctaaggctgccagaatcccattcacatccaccttgctgttttctccttcacagtcacaatctctgggtaccacggtcattcaggcaccgcttacttgaaccagataggctgtagatagagaagacctggtgacgttggagaggtggtttcaggattaatagaaactacaatgattccttgagttcttaaaatagatttcaaatgaaacatctggggtctctaaaatgataattgaccttattgctgtgtgctgagatttctgttttagaactccccaaatatcttttttttttccattttacagtgactgtaattacagctaaatattatgatagagatttggttgagcttcaggaaccacagtttaattgtggctttgctgctaacagctgtatagcttctcttatgccatttaactggaccttatctttgtgttgatctctttgataatttttgtgattctgtggtccagtgttaagagttcaaagctctgtgctctccaacccaaagctgtctatccataaaacaccatttcctcttctctgcagagcagagctctgtccaggcaagattactctttaaaatcccttggaaaacccctcccaagagtctgactgcccacatgattctgcagtgtagccagaatgaaaattgaagtggtagtgtgttaatctgttctaagctacccagtgggcacacgcacactcctcactatttgcccaaatgttttggattcagagtgaaagacacacacatgcagccttatttttaatatgccctaagcagcccaacagctgggccattccctgactcataagttgctaatgcctcccctctgatactcctgaattattacttactgaaagttatgtttcacctctgctaccccagacccagctggaggagtgagccctgagcctactcttccctgattctctgtcttctgcagctcccatgctggcatcctgttcctttcctggcatggcggttctcccctccctcgagttccttgcccaggaacctcaaagtcctgcctcagtctccctgcacagcctttggccatcagcaactttatttatcaattagaactagctgagggcagggactgtcagtgtctcacatgcagacaagtgaatcctcttgtaatttgggaacccaattaacataatataagcaataaaccaaatccataacatctcatcctttccatccattaaaaagccttttctctcagatatacattgaatgtagttaacagttgcgtaaactataaggtatgatatacactaatcatgtccagtccatcaattttgtcaatttaggttcattactctaacatctaccctaacttaaagagtttacaattctgtacctgaattatgttttgatttcaactacattaccatatgaaaaccatcctttcaaatctacatcatcttccttaagtgctagacaacttaagtttgattatgagattataactagtcttcaaccccatcagagatccaagaacgaattaaatattgcctgaatctataggaaacacaaaaacatagctaccaaaacttcaccaatttgcagaaacagctgactacctggacagttccccattcctcaaaacgtttgtcttcagccttctgacccagaatcacctgacagaacttaagtgaagcaggaactatgaaggactagctaacgctgtattggcagagcaaagctgtcgactatcttggacaatatttttggggggtggggtggggtctgtaggtgaattagggtaattctttcccagtggctacttgccacaactggaacaactccatatggaggttatgatgctcaatatcttctttgaactgttgggaactgacatgcctcttagtcaaaattctgataataatgaaatgattataaatgccatattctgtggagttctgatgtttttgaagactctctatataaagtatatctgaactgttaaatcttgactactcttagctatttctatttgaatactattaaaaacactttattataattaaatcagaatctaatataaccataagcttactatctagcccttaacttgtcatccttaatcatcccaaacagtttgtaatagcagctatagaaggccttatattcttaaatgagttgcatgggcacaactgctaatgcctagctaagagtaacaatattaatttcaaaatttgtatcaatacataaagatttataccaatgaaaactttaaatctgtatcaatatataaattctgtaccaatgtaagaaattatagcttcaattttgcatctattataatgatttctatcagtgtaagattatagatatacagtgctttactcaagaataagtttagtaatccatcccatctgttttctccctgttcaaaattatgatcacttccaaattatcccttagtgacaacctacctataatttataaaataaccataaccagaccccaaaaccaaggggtcgggatgatgactttcacaacttctccctgctgaataggggcgatgaaaaacattttaaaggactgtggagggatatgaaaattagaaaaattggttagaggccaagcgttggtggcacacgcctttaatcccagcactcgggaggcagaggcagaggcaggcaaatttcccagcctggtctacagagtgagttccaggacagccagggctacacagagaaaccctgtctcgaaaaacaaaaacaaaaacaaattggttagacttaagaaagctagctttatcatcggttattcagtctctgtgtgcttagaaggcttaggacttgactgaagttctgactggctctgtctgaaaggctggatgagctgagtccatcaggaatcagcagctgttcctgacactgtgttgggaggcaggtagctggagcagcaggtcacctcagcatccctgtagatgagtgttgtcagagctgtacattctgtaatatatgaatcttacaaccaaatttttagaactattaagatatttgtatggattgtgcaagttgcacagatcagttaaggatgagattttgctcctagtttgagtaggtaaaaggcaactctccttttatgagttaatttgatcaataaccaattgtaataaatcttcaatcatgccatgtgaaggatggcatgatgaagggttccacaaccaacaagatttattgtctaagtttagctgtttttcgctagagacatttttatgtctcagccatttacagggctgttcccttgtgtaggactcagcaaatcaagttacctgtcctgtttgatttttttcaatttttttttcttttctgtagccaaggtcttcatggggccttcccctgatccatgaactctggaaggagttcaaagtcttttcttttttcctattaatacaagtacagagcccctctttcacaatagtaggtccttggtctagtagcctgaaatcatcaaaggtatagattgattgaaattggcagtctccttcagtcctgacctattttgacctttctcccagaggactaaatcataactaccaaacttataaccacatgcattttgataattaaaacaattcaaagcaatcaaagcaatctaaacaaaaattattatccattgaaacagtgctcccccactatctcttgccttgttcttacacgattaatttttaatagtaaggtcaaagcctaaattcattactatatctatgtatacttaaattatcccttctctgtgggtatgtatgttccttttctctttatattacttgaattagtatccttttctatgtatttatctttaattaaatttccttctatatgtctgtgtcttagtcagggtttctattcctggacaagacatcatgaccaagaagcaaattggaaaggaaagggtttattcagcttatacctgcaaacttctgttcatcactaaaggaagtcaggactggaactcaagcaggtcaggaagcagcagctgatgcagaggccatggagggatgtttcttactggcttgcttcccctgattgcttagcttgctttcttataaaacccaagactaccagcccagagatggtaccacccaacaagggactctcccggcttgatcactaactgagaaaatgccttacagctggatctcatggaggcacttcctcaactgaagctcctttctctgtgataactccagctgtgtcaagttgacacaaaactagccagtacagtctgtatgagcctattttagtagtaatttgtcataccaggctaaacaatcccagaaatcttgtgtagaccatgttcgaaagatcccgagtactgccctggcatagacttcttcacctctctctctctctctctctctctctctctctctctctctctctgttttttgagacagggtttctttgtatagccctggctgtcctggaactcactctgtagaccagtctggcctcgaactcagaaatccacctgcctctgcctcccaagtgctgggattaaaggcgtgcaccaccagcttcttcacatttcttttaatgaatttttttctcattcattctattctctttatcttcatgtctttgtttcctacatttagatcaaaggtgtgaatttctttattctgtgtatacataaaaacacttaaacaattaccataatactcctttctattcttaaaaacaattaatcagatgtcattcatctctgtcttttgttcatctgagcagtggggcaaccagcctctattgcctgtctctctctgccttctgagtagcctttctgtttgcaaagcaggggttcccagcacctctgagttcaaactctcggaggctgttaaaagcctttgagaggggcccgggataaatcccggacacccagctttgtctgggtcgacttggggaacttaactgtgtctaaggtttcttagaaccttagaattatgcgtgccttttgttcgagttccaaacctgtgccgcttagggagggaccacatgtgtggctgagctctgctcagctgagaaaccaattctcccgtctcctaatcttgggtcacagcttgtgtcttccatttcataatctctgattaatttttaaacgtgagtacaaacctgacacattgaacaacatctgaagtagtatggcagtcagctctaaactccccagtgggtgcactgggtccttcctacacacccaaatgttttggattcagagtgaaagacacacacatgcagccttatttgtaatatgccctaagcagctcaacagctgggccactccctaactcctgcgttgctaacgcctcccctcccatattcctgagtataattcatattacttactgaaagttatgtttcacctctgctaccccagacccagctggaggagtgagccctgagcctgctcttccctgattctcacctggctgtcctctgtcttctgcagctcccatgcttgcatcctgttcctttcctggcatggtggttctcccctccctccagttccttacccaggaacctcagagtcctgcctcagtctccctgcacagccattggccaccagcaactttatttatcaattagaaccagctggaggcagggactgtccatgcagacaagggaatgctcttgtaatttgggaacccaattaacataatataagcggtaaaccatatccacagcatgtcccctgagggtctagatcctagggacacactgctgtcgtacctcccctatgccttaccctttcattctgaagtcaggatcatttcattctttaggagatggtgtgtgtgtgtgtgtgtgtgtgtgtgtgtgtgtgtgtgtgtttgtgtgtgtgtgtggtgtgtgtttgagagagagacagagaaagagacagagacagacagacagagagagatggggagagagagagagagacagacagacaactgtttagactgtctctgaacttgatatcctcctatcccagcctcttgagattgcaggtgtacattcccacacagtgagggcatagctacttttataactttatagccataagagttaaagggcagctgtttcttcttggcatgctgtttctgaatagtcttcattgactcagtgcccccctgtttcagccatgcttggccatcaactcagaaaagcagtaagaaaggtgcagagagcgtaagtactaagtgcccagtattggctttgagctctctgaagtgattcttcaaggaagctcccaggagcggcaacaggaatacctcatgaagcttgtgagaaactctgaccctgaccctcagtttcttccctgaaccagaggcccttaaagtggcaccgatactcccagagccttctaggtaattctccatgctactgttggaacatttttctagaaaaatttaggttttcagacagttgggttttatttctcattttaatgtgatgacattgtttttgaaataatcattggactgctgtggttaggagggatttcccctcccccctttatctccccgtgtctgtctctatagtctctccctcccaccctgtctctctctatctctctctttcctgtagtccaggctggcctcaaactcattatgtagtctaggatgccttttaacatatgatcctcctgcctccatgtctcaagaactcagattacaggcttgttccgtcaagcctagctggacattacacatgtttaaaatatgcattttagttatgtgtatatgtgtatcctagttaggattcttattgctgcggtaaagcacaatgtccaaaagcaaattgacttccacatcactgttcatcatcaaaggaagtccggacaggaactcgaacagcgcaagaacttggggcaggagcttatacagaggacgcggaagggtgttgcttactggcttgcttctcatggcttgctcaatccgctttcttatagaccccaggactcccagccaggagatggcaccacccacaatgcactgcctctccctaccctcatcagtcactgagaaaagccttacagttggatcttagggaggcattttcaaaattgaggttccctcccttcagatgactctggcttgtgtaagttgatataagggagccagcacagtgtatgtctttgtgtttgtgtttctgtacatgagtccagtgtctgcggtgcaggaaaaagatggcgactcccctagagttaggattacagactgttgtgagctgcccagtgtgcagagaattgagtgtggatcctgcagaagagcatcacgtgctcttacacgctgagtcatctctccagccctggatgttatagtttttttttttaaagaaatattttccagcctattcttttgcttgccagaagttttcacattgttttctgtgtttcaaaagcttctttctacagtgaacatttaggcttagcttgtattgccatggagttatgagtacctgttagttcagggatgtactgtgatgtacagacatgagctaaaatggagagatggtcactgataaaacccttgtttcttttcttcttccgagctggtttattttctattaaacctcccagatgctgttttgttactttagaataggaaatctatattatctttttaaaaatccctcttaaacaagtggggttttcccaaaaatttctctagccagagggaactcttcattaaacagagcactttctggaaggagagcgtatgagcttatgtcaggaattaagtgatggagaaggggaaaatgtcgcctggccttaggtgcagaaactgacccagaagccttggccaagtggcgagagttgacagagagccaatcgtggtgcttctgacccgtgccttggcaggaacctctctgctacctttagacttcagagcatctctaactggttggatctttgtcaagagcttggtccgaggtggtttcttttcttttctttttatttcttttctcttgatttaatataaagcactcacaaattctttcaagaacaacacacagctttgtttagctccctcaagccctttcacctctgtcaagttgcaccaggaaatttaaggtctagccagaggcccccaaagagttaaaaaaaaaaaaaaccaaaaccctcaaccatcctgcagagtaggagaaattgatgtcaaaaacagatgtgctgctgtgggccttgctgaattcataagtcaggataaagccagtatgtatgcatgcatcttaaaaaaaaaaatcttggccagaattatagagaaatggaaggtctcctctgcgattcctcttcaggccttgctggccaggagccctggtgaagggctcccgggagacaggtggccctgacaactcctaaccattaagtcagaacgccctctaatcccttgttttccttgttggtgttctgcagggccgagctccctgcacagagcctgcccgttttcattggctttggggattgttattggagtggctgacagctgtctgccaggctgtctgaaactgccttcctgtgctctccacactgctccacttcacagcgctattgttcctgtccagccttttcttaaaatctttcccagctgtatcctgatatggcaaaccacctaaattagctccagattgttctgtttattttatgttagataagtgatagactatagtcccagcagcgggccaaatggagggtggaaatgggggcagggtgttggagggggtcagaagacgctcgattttttactgcacagggagagttccagacaaaactctgaaatggcgcatgcgtgacagagccactagtcctgccattcatacgtgacccagagtggttggcaagcataaactttggatctgaacagcagaaaagagaaatcagaaccccaacacaaagccttactagacagaagcaaaaatatctatcctggggaaaacacataggatctgtcaggttggtttctatgccagctaccacacttgactttcctgtcaacagagacccctctcacttgccagtgaaaggctctgtgggttcaaacctgtccccagtcctttaatctccctgtatgctcggcatttgaaaacatttgcttcctgtgcctgaatttaaagctagaaacccacagcaattgactcgccatcataactgctttccatacagctgcaagtgaaaattcacaatagatttggcctcttctgctcctcttggccatctgtgcaactgcttaactgtggcctctcccctgtggggccaacttctagcagggcctctccacagagaccttccaaatgcttaacaaaaaagtgttttttaactataactagattctctcccaggatgaagacttcatatctgtagggttaaacccagatataatataactagattctctcctaggatgaagactttatgatctgttgggcaaacccagatacaatataagaaatgaacgtccaaagcttgactcagctgaagcaacgctagcagccactgagtgcttgtctctggtaactcaagactccctagtgaagatagccatgactcacttcagagctgggccactcctccccatgctgagccaaagtccttgaaaccctttctgccatgtgcaaagacagggaggagagcagggtcaggagtaataaaaaaaaaaaaatgcccctaggaactgcctctcactttccttttaggaaaataatctcactgtataatttttttaaatgacaaaaccaactggagaaaaataattaccttgtcaaggtctcttggccccagtggatatgcctttggtctctatgaaggtccagtatggagctgcctggcctgcatgttaccccagctctcagcgctggatctttctatgtagccttgttggcttttgattgtgtacagccatgcatttgtccctgggccaggcttctcctagttgtgttcatggaaaggagactgaacctgtctccccttgccacaacactaacagcctaggaggcctttaatcagggcctagcaaaccaattttttttctttaattcttaccttataccatgcacctcattacacttttgttttcattcattcctagactttaaaaacagaggcaaacagctcatgtgcccttggcctgttctcattcaaaccatggtacagctatctccagctagctaagatggagtaaacaagtcaaggcttcctcactgtggcagataaaaatgagaagcagaaagcagactgtctgagacttcatagggcaaatggtaaatgagtggactctgggttttattaattcttgtgacggggtaagctctgtgtgtttgttttctctcctctgtctttcaggtctgacacatgaaacatgaagtaggcactgatagtattcttttgaagaaatccctacttctaatagtgagtgaagaaatcaataatctgaaaaacatgaggaactcacctcacatttctcttctccagtattctctgctctgtgttctatgccctgtgctctgtgttctgtgttctctgttctgtgctctgcactctgtgttctgtgctgtgtactgtgtgctctgtttgctctgtgttctgtgctctgtgttctgtgttctgtgctgtgtgctctgtgttctgtgctttgtgctctgtgctctgtgttctgtgttctgtgctgtgtgctctgtgttctgtgctgtgtgctctgtttgctctgtgttgtgtgctctgtgttctgtgttctgtgctctgtgttctgtgctgtgtgctctgtgttctgtgctgtgtgctctgtgttctgtgctgtgtgttctgtgttctgtgctctgtgttctgtgctgtgtgctctgtgctctttgctctgtgctctgtgttctgtgctgtgtgctctgtggtctgtgtgctctgtttgctctgtgttctgtgctctgtgttctgtgctgtgtgctctgtgttctgtgctgtgtgcttgtgttctgtgctctgtgttctgtgctgtgtgctctgtgttctgtgttctatttgctctgtgctctgttctgtgctgtttgctccgtgctttgtgttctgtgctgtgtgctctgtgccctttgctctgtgctctgtgttctgtgctgtgtgctctgtgctctgtgtgctctgtttgctctgtgttctgtgctctgtgttctgtgctgtgtgttctgtgctgtgtgtttgtgttctgtgctgtgtgctctgtgttctgtgctgtgtactgtgtgctctgtttgctctgtgttctgtgctctgtgttcggtgcggtgctcggtgttcggtgttctgtgcggggggctcggtgttctgtgcggggggcttgtgttctgtgctgtgtgctcggtgttctgtgcggtgtacggtgtgctctgtttgctcggtgttctgtgcggtgttcggtgttcggtgttctgtgcggtgttcggtgttcggtgttcggtgcggtgtacggtgtgctctgtttgctcggtgttctgtgcggtgttcggtgttctgtgcggtgtactgtgtgcaatgtttgctctgtgttctgtggtctgtgttctgtgctgtgctttgtgttctgtgctgtgtgctctgtgttctgtgctgtgtgctctgtgttctgtgctgtgtgctctgtgttctgtgctgtgtactgtgtgctctgtttgctctgtgttctgtgctctgtgttctgttctgtgctctgtgttctgtgttctgtgctgtgtgctctgtgttctgtgctgtgtgctctgtaatctgtgttcagtttgctccatgctctgtgttctgtgttctgtgttctgtgctctgtgttctgtgctgtgtgctctgtgttctgctttgtgttctgtgctgtgtgctctgtgctctgtgttctgtgctctgtgttctgtgctgtgtgctctgtgttctgtgtgctctgtttgctctgtgttctgtgctctgtgttctgtgctgtgtgctctgtgctctttgctctgtgctctgtgttctgtgttctgtgctgtgtgctctgtgttccgtgtgctctgtttgctctgtgttctgtgctctgtgttctgtgctgtgtgctctgtgttctgtgctgtgtgcttgtgttctgtgctgtgtgctctgtgttctgtgctgtgtactgtgtgctctgtttgctctgtgttctgtgctctgtgctctgtgttctgtgctgtgttctgtgttctgtgctgtgtactgtgtgctatgtttgctctgtgttctgtgctctgtgctctgtgttctgtgctgtgtgctctgtgtcctgtgctgtgtgctctgtgttctgtgctgtgtactgtgtgctctgtttgctctgtgttctgtgctctgtgctctgtgttctgtgctgtgttctgtgttctgtgctgtgtactgtgtgctatgtttgctctgtgttctgtgctctgtgctctgtgttctgtgctgtgtgctctgtgttctgtgctgtgtgctctgtgttctgtgctgtgtactgtgtgctctgtttgctctgtgttctgtgccctgtgctctgtgttctgtgctgtgctctgtgttctgtgttctgtgttctgtgctgtttgttctgtgctgtgtgctctgtgttctgtgctgtgtgctctgtgatctgtgttcagtttgctctgtgctctgtgttctgtggtctgtgttctgtgctgtaggctcggtgttctgtgttctgtgctgtttgttctgtgctgtgtgctctgtgttctgtgctgtgtgctctgtgttctgtgtgctgtgtgctttgtttgctctgtgttctatgctgtgtgctctgtttgctctgtgttccatgctctgtgttctgtgctctgagttctgtgctctgtgccatctgctctgttctcttctttgtcccgagaacctgaggcttgtaccctgtctctaactggctgagcgcctgcacaaaaaacaaactcattcctttagagggttctaggaaaacacagtattcaaagtattcaggatataattcagaaatacttatgtcacaaagagcttttctcagagcaaaaaaaaaaaaaaaaaaaaaaaaaaaaaaaaaaaaaaaaaatccacacatagatggccatctttgagatggtttaaatactagaattcaaagataagcatttttttgttttaattttttaatttaattcacacatgcatgctttgtgtactaatcacactcatctcctacctccctacccactcctgtctacatctacccctatccttccccacagttctctctcacgcattcacacctgtctgttttgttttgtgacctaccaagactaaccagagccatgtgtgagagctctgcctgtgggttcagcagagagtagacaactaaagacagtggctcccccttctcacagaatccattaatagccaatagttcagagggaaagggtggagccctgtgagcccctccccttccttcactgagtataggtagggctagtcttgtgtgggctcagcacagtaaatacagttggtgtgagtagatggttacagtagttgtacctagtctagggcatggcattcacatccctctccatcttcttctggatagtacatacttcctgcctcctcttccacaatgttcctagagccttagaggtggtggtagaagtggcttgtttaaagttgggtcggtatccaacacttattctctgcatcttgggcagcgctgagtctctgaactcaccactgttgggtgtagggagaggcctctccaagtcaggctgaagctttctgtgggacagtttatggaagcccttctccatgagatgtcagcaacacagttgaatgagagttgttaagttctcagtagagaaatggagctacaacctaacaaacaagcaaattaaatcaacaagtggggcctaactggaaactgcactattgaaatctagaatatattttcatggcccgaaggaggatgacagtggaaaacaatcagtgaaggttgggatgagtccacgggattatacagctttaagtgagggttaagaaggaccgcagggaactgagtcgaaaggatggaccatctagagactgccatacccggggatccatcccataatcagcctccaaacgctgacaccattgcatacaccagcaagattttgctgaaaggaccctgatatagctgtttcttgtgaggctatgccggggcctggcaaacacagaagtggatgctcacagtcagctattggatggaacacaaggcccccaatggaggagctagagaaagtacccaaggagctaaaggggtctgcaaccctataggtggaacaacaatatgaactaaccagtatccccggagctcatgtctctagctgcatatgtatcagaagatggcctagtcggccatcattgggaagagaggcccatcggtcttgcaaactttatatgcctcaatacaggggaacgccagggccaagaagtgggagtgggtgggtagaggagtgggggggggggtatgggggacttttgggataacatttaaaatgtaaatgaagaaaatacctaattaaaaataaataaataaacaaataaaaaagaaggaccgcagggcattggctttccaagagtaaagacatactgatgcagaaaatgttatgaagcagaaatgtttgaaaatactgcgattttagtaaaaggtccatgaatagattaaagaaagtcggagataaacctactcaacaaactataagaaaacaatggccaaatcataaactgctgaaaaccaatgaggaaaaaaaaatgtcttaaagatagcaatcatattaaaaaaaaaaaaaaaaaaaaaaagtaagcccggagttttccattgtgtagctgctcatttggagctgcacagcatcttgaaagcctggatttggtccccagcaccactccagcagctgtgatggtgccctcccacagtgccaggacttgggtggaggaggagggcccggcgggtcatcctccactacatactttggggtcaaactaagaaacatgaaaccttgtttcaaaagatttttttttttaatttaaaatttacactttgtgcttgtagcattttcattcagtgcttagagttgagcccaaggcctcagacatacctggtaaatgccctaccactgagctatatgctaagtccaacttcattgataacagataaagaactataactaactaggggcttcccacagtgtataaggaatgtgtaccatacacaccagtgtggagggattcctaacacattgtgcagaggaaagaaagccagaccaagattatactttgtgcttttaaatttttatttatttatttatttatttatttatttatttattggcagtttattatattattatagtgctatgaagtacaaaaccaaaaaattgtttgtttatttattgtttttcttttttaaaaaagatttatttatcatattatgtgagtacactgtcactgtcttcagacacaccagaagagggcatcagatcccattacagatggttgtgagccaccatgtggttgctaggacttgaactcaggacctctgaaagagcagttgatgctcttaaccactgagccatctctctagtccctgtttattgttttttgagacagggtttctctgtgtaacagcccaagctgtcctggaactctctctatagaccaggctggcttcgaactcacagagatccacctacctcagcctcctgagtgctgggatcaaaggtgcatgccaccacacctgtgattttatttttaatgaaacattctcacaggagcaaaactttagagatggagagataaccatggaacgagggacaggggttgaatgtataacttgaatacagaaacgtcgcataggagtcctcctggggtgccccgtttcttgagtatgattgttgttccgtggttgtcaaaagtcatagaaatgcatgtagaacaattggatttttatcatctgtaattttaaaaacaaaacaataaaccaccaccagcacaccatctcgtgtctgagagggttaacgtatttccacggccatgtgaaatacaggaaagatttgtgtaatcccttatctattttgaagtcattttccacttgattcatatttaaactttcaggaagccaaaaatggaataaacaatgaggccgtctctctggctacatgcagaaagctttccaaaactgaatcctgtgtttctcatgcctgatgcatgttttatcgggatcaacttgccctcaaaggactccactgagaaacggggtttcaaagtaaggtcactgaagctgagagagactcactggctccaggacatagctgccggtctgtgcacacgtatgtgcatgtgtgctttatttataagaagccaagtcaatgtgacagaccagtgaaagcatgacaaactggctgtgtcccaaaacctaggggttttcatagttaggatagtgtttgaaatacctgtccagaggtgtctaccctgagcctcaagactcatccctgacatccctgaaccaggcaaggcagagtggcgagcgtgggtggtttctgtgatgcaggctgtgtgcattcctgtgacaccaggaagagctttgctacttgtgaaatgcctcgtctaggctagcacattcgggatggatgctccattgcaatggtgcctagcagggactgcactctttccttttgaagtcacatcacctgcttcctcttaaccctgtgatgggtcttactgattcttataggcaagcatagtgtcccaaaaacttagcttaagagacctttgatctatcctgatgcacaaattattttatgtttttctgtaagagtttcatggggtttgttttacttttaagtctttaatctgtctttcctttttattttgtttatgggctggatagttttatgtcaacttgacacaagctaaggtcgtttggaaagagggaaccgcaattgagaaagcgcctctatcaggctggcctttagggcattttcttgattaatgattgatgtaggaagtccatcccactggaaacagtgccagtcttgggtactcggtcctctcctgtataagatgcaggctgagtaagatggaggggagtaagccagcaagtagctctccttcatagttctgtttcttttcctgctccaggtttctgccttcaattcctgtcttgatttccctcagtaatgaagtataagccaaataaccttttctcccatgttgcttttcattagtgttgttaaagatttgtttctagttgatgtgtataagtgtttgcctgtatgtatgtgtgtatgtgtagcacacacacactgcaccaggctagaaggggcattggagccccagcaactgtaggcccagacagttgtgagccagcatgttggtaagaaaaccaggccctctgggagagcagggagtgtcctcctgaccacagagccatccatctcttcagcccttcaccctgtgtatcccagcaactgaaaccaaactaggacatcacacaattgctaattgaggtataattcacataccacaacatttaaaaagcgtgcaggtttttttttgtttgtttgttttggatttttttttgggtttttttgttgttgttgttttactagtttgtagtattttcacaaagttgtgcatttgctgtcatcatccagttccaggacatgtttgtcagctctgacagaaatcctgcacccattatcagttgctcccattcctgtccctcccaatcctgcagccactgtctacggtttctatatagattttcctgcttcggacatgtcatataaataaaaccatgtggtatttggtcatttatgtctcactttcgcttactgtaatgttttaccatgttgtagcatgagcctgtactttattgtcttctgtggtggcataaaagtaactagtttatctggaacctttctgaagagccacctacatgttttcccagggagccatagtgatgtacggggagtgttgcgtctccagcagcagcatgactagttgtcacggctccacatggacaccatcaggtttttagtacagttgtactctgcggtacaaacgtgacatccctggggttttggtttgtgcctacctagtgaccagtgatgctgggtatcttgtatgtgttcattggccatctataaaccttctttggagtgatgtctcttcccaccttttgctcctgttttaattgacttctttgtctctttgttgttaaattgtaacataactggcttcagttttttagtatatgtcatgaggtcagaattagtcaaggtttgttttggttttgtcctggagttttttttttttactcaacatagtctagcaaactgtttccctttgtcaggcttaatacctttgttaaaattcaaatgctcttacaccacagagtaaccacagatttctttgttcagatttagaagtgtaatacataacttcttttcttctcatcagtgaagccaggatggcctgggttcctgttctgctctgtgtgtgtgtgtgtgtgtgtgtgtgtgtgtgtgtgtgtgtgtgtgtagaggtggggggacacctcatatgatgttttgcatgtcccttcccaaattgaattgccacggtgtctatatttgagagacagggatttagaagtgatgtggctaaggatggattaaggccgttactgcaggagtagctttgttgtaaaatctctcccatccatctcttcagtcctcctgttttctgccatgggtttatgcagctctgagagagtccttcactgaaccgatgggcctggattttgaagcccccaaaactctaagttgacgcctttatactcatttagccagtgataatctatgttaacagcaacaacagccagtgcaggccatctcagtggatttatggctcctttcctagagccggggcaggaggtgggagtgtctgctccacagtccttgctcagtggcaacattcctgttcccagcacatctaccatttcacccatcaggaccatcctgggtcctccctgttgcagagactctttgtactacctgcacatcatttgtgtgcttctcaacaacagatagaacattcatgagcggacctgagctcccctgatgctctggtgtggcctgctacctgaaaatgcagaggcttgctgttgcctcttctgcccccagtttcctctcgggcatgagatagcccttatgaacatcattccatattggggtggaatttccagagcttgggggaacccaaggatcttcttagggatgcagctgcactccctcgcttttctgctgtcctctttccttctctaagtagctctgaatgactgtcccagtcagaagtcagtttcagttttctgctgacgttgtccccagagggtaagcattgactgccctgattgcttcctgggttagggtgacaagaatgacaaggaatgagaagaaccttgctatctggaaacatcattgcagaagagataaaagtcaccaagggcattctgtttggtttatgggtagctctttttcgatatttaagtctaacatcactttactccagcatggatttcatatgcatatgcagacgattctggaagagacgtctgtgaaggtttatcttatatcgatatagattgaaacaatgatgtgaatatggaatataaaatgcttttccttatgtctaaactatccttaactgtgccctgagcctctcactagctaatgatggaggatattcattctaacagtttattctaatatgtttcatatagtagctccttactatacaggaaaagtgatcacttgatgttagaaaagcaggcacagtgcacagcttatctttaacactcaggtctttcttcatccattcttcagtgagagagtggcctgcattctggtgcagattttagcctgctcagagactggacgccacccatatcagtagaattgagtgtgagacttttcagtccctgcgctcatctctgataggctggactctgtgagcctgttgtgactacacagggacatttgttttgctttagcagattgtttggtcttgctttcgtcctggttcatggccgttcacatgcctctacttcctgccttgttaacctactctgcctttgctgggcacagagtccagcccaattctcacctcttttttttttttttttttttttctccagtcatcctcattaaagtggctcttgtgcttgcttgggatttcctgcatcaccaaagctcaccatcactcctgctgtgctggcccaagggctgcctctggccacatgaaagtctagtattctggggactcagagagttttcttttcctttggccttggagcaagagtcatctgcacatctaaagacaatctttttcttgcactcagcatctcaaatttttaaccagactgcttcatgtttgggcttatggagttttttttgtctaccattgagtgtttcctcctctgttcttcggacagaagtgctggccagttcttataatgtttgtctgcctgtcctgatgctggacaccaaccaccagtgggatcctttagcatctggcaaagcttcagagaagggctccggggaaatggaactgcccgggaagtggaactgccgggccccttagttcaggtctcactgacttttctaagtctctaaagagagtcaggaagatgctgatattaagagtgctagttaacagcaactctgcaggttttgacacatgtaactaatattgcatatttggaaatacaaaagcaaaatagccaatgcttacctaaacggaatattctagctttctctgatttagcaatctccgagactcactggcctctgcattttccctaccacatatgtagtaatacatctattattttgaaccacaagtctcttttcctgtctgttcataggattttcagttacttgctgctgtcctgagcttgccaaaccttcgagtgcttctgcagtaattagcttattgtttctcagtttggtattactgaaagactaagctgcagactcgtggagaattacctgaccgtcaagaatggtttttaggtttgggagaggagttaaatgattggtcagtaaacactaacactcccgaggggcccccagatgtagtttgcctgcaagtttgtaaaaaggataaaaaaaattttttttaaataaagaatttaaagttgagcattttctgtaagagcaaactataagaaagacagaagattttacaggttttatttttgtttttgttttttctagaatacatacttggtccttctgcttagtataatagccactcggtccttctgaactgcttctcagaggacctggagaacaaagattaagcgtagcattgttattaagcgtagcatcgttatgctttcggagagcaggccgcatgcctccctttgtgctgatcttacagcttcatctgaggagctcccaaacctgtgcacacccaagctttaaattacgaaaaagttatctgcgcccagagtgttgtaaattagaacacttttccggttcccagtcccctcatgactttcagagagcaagtgttttcagtctttcaacagacttttgtatctttttgcccttagtacatttcaaagaagagataagaatctcagcggtctctcagtattccaagcaatagacatccctgccgtcagaatgaggaagttgctctatttccgcacttacaatccttcttgtgaatcccacagccctggtttggcctttcctcaaatccatctttctttatctcagctctctggtggccgagtcagttatttggtgaatggctgccaaatcactcaccttcccagcatcctcttggagccgctcagcaggatcctccctcgctggttgctgtcaggatggaggctgaggcgggtgtccagggaggccagcgtctctggcacttatcttccttgagtaaagaaaccaccacaaacccctagagagcctcagatgaacatctggataaatattcagtttctgatgcttcatttgaatctcgggccgtccttactaaatcacactgaacttcatttaaacccatgcaaatagaaaaagttcctgagttttccccaataacaacaaaacccaccataattcagtccactcttccgctttcaaaaacttgctctcagtgtagcatgtgatctagcagggctctaagcatggtgcctgggaatatagctccaacatccgggtttacccgggccttaatgcctgggtagtgcttccgtgtcagacatcatgttaaggtgggttttgttatctttgctttccaggctcagggataaaatatcctgcccagattcacagcccttgccttgaaagtgtttcagtgaaattaacgaagtggaagtgaaaacaggtgatcacagtcacaaaatggctaggtagatcttgttcacacctagccatcattctgctcctgatttcttatgaatctaagtcagaggagggctgaggacagggttcagtgacagagcacttgcctcacatgtaggagacaatcagttacacacacacacacacacacacacacacacacacacacacacacacacaccacatacaaaaaaaggaaaaggaagaaagatagataattagtctttgactaaaaaggtcttgatattatgtcaagaacccatataattgaaaaaggcccttgttctgcctgctccttgtgtctgagctgtctgctttgtaatggccatgtgactgcccttctggtttcaggttttgttttgttttgttttgttttttaagatttatttgggggctgtcagagccatgaagctggggttacaggcagttgtgagctgccttacaaggatcccgaaaaccaaacctgggtcccctgcagaagtagcgagtactgttgatcacccagccatctctccaacagtctgatttcatctcttttgacaggtcaggttactgcttacaaaggaagaagggatcttgtctctttgtcttacttataccatgagaggaggaatttgtatgtctcatacacaggctgccatgttctaatctaggggggctctgccacatggcagaactgaaaatgggtttgctaagctgcaatctggagagcctcttccagaccagggttttccaaagtgctcttctgcagcccccgtgacgctcggcatgactgagcaggtacccaggggacaagctattcttgtatttgcaggtttgatacttgctcaaaccctcactggggcccgatacctcacttgatagtcatctgtctattagagtagcatcctctttctgtaaggtcaaggtcaggcaatggctgggcagggccttagagagccgtgtagtgtccagcgtcaattctcagagtcttcactcgctatttggagttggtggccttttcttcatgtatttgttctttttctgtgagcaggtcctctgtgaggtcttgcaaacacaaacaataaacttccttcttagccctgaggaaagaggcataaggaggaaaaagccacaaagagccaataaagaagatggagaaaagggtgtggcctggagaggtttggggtactaagtgccaggttcacaagaggtctgacgtttaggccttaaggtttgagtccagcggacatgaaggaggatgtgcttatgtgaggaaaccggtttatgcgagttagcctgaaaggtcatggtgtattctaacagtgggagagcttagttgtgcgtgaccgaagcgtaagcactcataggcttgggtgcccacagagcaggctgaggccatgcgtgtaaaggattctttctgtcagcagggttgaagtctcagctttcctgtgatgggcagtcaactgggcctttaaacatacatgagtttggatctttaaaaaaccacccctggtggcaactggatgaaacctgcttagcccaggagcccaggagggggacaagcttaccccaggcaggtggcaagtccacgtccagcccaggcagaggtgcttgaacgtggccagacaaatgtgcatttgagcatccggcttgatggctacgttctcagactatcttagtgcaaggatattgaatttccctagacctttagataacactaagacacagattaattctctattttgcatttagtaatgtagaaaatgaatccaaaagagtcggctatcaaccagcaggtacagctctgggacaaagagcctccccaccccacctccctttgcagaacggtgtttctctacatttacccaccacacccccaaggttgccccttgtagagaagcctggtgagagggtgaagaaggacactttgctttttggatcagcgggaggaggaggtcttggggaagcctgggctacacagcaaagccactggactgtctgggggagggaggtcctgagaatcaatgttgtcatggctccattttaatttttatcagctggatacagatgaggtgtcagtttcatagacttgatgtttttgctcagatttttggctaactgatgcttttccatggtttctgacagttatttttatttgataatgaataataaagtgagatttgcagtctacatctgacagcatttgttttattttgacagttcttttctagacagcaaaggttttataattaggttttgtgtctgccaaaatgttgctgaaaggaaaaaaaaaaaaaagaacatttctctggaaaaaaaagtttcatagtttccagcctgcaaagctggaaccatcttattttgatttggaagcttttgcaaaagtcagtcaggaaattaaaccaaattttcttttgaaaatgaattcttatcaggagaaaattaaccctggctatgtagagatttaggagggagaattagaaggggtatgcttgaagtatggtatttcaatagtccttgtaaaaatcttcatctggatggatataggaaactcccttttctactgttttatgagagcacatgcattcttgcagtgtagaggtgccacccccagggggcgctgaagcctacaccactccaccacccccacccccaccaccccacccccccccccccagcacatatggaagaatcaggtggaaatcataggtgtggcaattgacaatactttctgcttaaagcactcttgaaaagctgacagaggaagccatgttgctgaccggagctagggaggcttatcattgctaatggcagaaacagcgtggcgcgataatcacagaaacagtcctactactcactgccttggcccctggccgactggtgcgagttcctgcagtagcggcagtggccggattcgatttacaatgttttcctctctgactcactccttcagactacttacgatcagatagatcagatcccagacacagccgcccttgtccccaccacctctgatctccaccgctaccaccatccagtactttccattgagcacaagtatgtgggaccgataaccacatagtaactagtatttcaaagaacggtgtctgcttaaaaaagagacaacagcctcgtctgtggtactgtggcacttctgtttacagcgtgtagacagctgagcaaaacaggatctgtgctgccccagccattcgtggcaccaggttataagtattcccttcttgatcattttttaaaaatagtttatttcttgagcttatagtataagtacatcatttctcccctccctttcctcactccaaactcttccttatacccctcctcgctctcgcaaattcatggcctcctttttcattatgttttatgcatatatgtatatacatatatactcttaaatatataaatacacttccagtctgtatagtgttgtttgtatgtatgttttgggggatgatcacttagggtttgatagccagctggggtcctcttcactgaagaagtctatttctcccactctcagtactcctcggcttcgagtgtattgttgagcacatgtggggctccttctttgaagtgttgatgtattggctatagagtctgacactctgagtattgaaggtgatttggaatgtgtgttttataaacttgcatgagtgattgaaccttgagtttggggttgggagaaaatgcaatacgggatgcatagaggtgggtaaggggttcagtgccctgacagcttttatagaggcctggggcttggtttcaggaattcacatagcacctgactactgcttataactccagctcccagagacccagtgctaccttctgacctctgcaggcacctgcacacatgtgcacatgaactcacagaagaacacacacataaatattgaaagaaatcaatggagtttaaagaaaaagtcatatacacctttgatatcaaattatgagatccattgtcaccaggcacatgcagaagagatcttaccttcatctagcctaacctaagacccctctacactcttctctgtgaagcaaagaaaggagcatgtgtcagagactgcatgagaagcctctgtgataatggatcctaaacatcttttataatagcaataaaagaggcccctggaagtgactctcctccctctgtctcatgggaggagtgcattagctctgctaggctgatgatgttgcttataccttgcttagggaaatgaagctcttttaaaagcccacactacactaggaatgtcaggccctggcactataaggcagagactggagctcagaagtcctcactagatgcctagcttttccattctcagctacttcctcctccttctcctcctcctcctctatcctcttcttcctcctcttcttcttcctcctcttcttcctcttcctcctcctcttcttcctcttcctcctcctcttcttcatcctcttcttcctcttcctcctcctcctcttcttattcctcctcttccttctcctcttcttcctccccctcttcctcctcttcttcctcctcctcttcttcctcttcctcctcctcttcttattcttcctcttcctcctcctcttcttcctcctcctcttcctccttctcctcctctttctcctcttcctcctcttctccatttcacaagatcattataatctagacttttggaaatagctgtggatatgataatagtcacaactatttattgaacactcaggaattaggagccttggcaaaaataatcctaaatggtataatgctgtgggaaataaaataaaaaataaagaactcagcaagctcctgctcttgttccgggcacctctctaccttgatggtctggctggccatgcactggtgggcaatggctgacctgtttttacctctgactcagagctccaaaatctttccatccagctctctaggttcccatagatgggtggttaccacaccagccccatgcttcaaagccctgtgacctttgttgcacctcaggcaaacccacactttgccactgtccctttctctcttgaacccagatgagcctctgcatgaaggaaaatggaacacaatcgctgggtgcaacaactaaaatcctaacttgtaagccttattaaatttaaatcaggtggcaaatcccaatggatccacctttgaaactgggagacactcataattacatcttgtcctcatgctatccctgtccaaagaggacctaactctctcctgcttcctcttttcctctgtccaacctagaagtccctcctatttgcccagtgactggctcctgtatttattagatgattggttcataagaacagcaccagtcatatccacaaaagtataattttattctaaccttaaaacaggaggaagaaattatagtcttcacaaggaagatggagaaactgaggtagcatgctgtccctggtcacccagtagtgagtagctgcccttagctgtcagttatgtctctgtctaatcttaggctttggaatcttgtgaaatccaagtggtacctgatgttgagttagtacttaaacgttttgagttattgttttccatagacaccctgtgctgtattatagagtcctctgtattcaatgcttagggctctgtttcagtccactatgtccaccatggtctgaaaaatagtaagtggaaacttacaaaataaatagcttccaaatttttgtttttgtttttgttttttttcaagacagggtttctctgtatagccctggctgtcctggaactcactttgtagaccaggctggcctcgaactcagaaatccgcctgcctctgcctcccaagtgctgggattaaaggcgtgtgccaccacgcccggcagcttccaagttttaaactgcacttccttctgcatggaaacttgtagtgcaatgcagtcttctgtcccactggtatgtggaatgttccttcatgcacatatagtgtggtaaccaggtacacaagagcaaccacaggcacaaagctttgagattgggtctttctgtatcatctaggctgctctcaaatgcctggactgagaaacatcttccttcctcagctaggacaacagcctttgccactgaacacttttaaaataacttttacaacagtatactataattgttctatttcattgttattgttgttgatagtgactgtgcctaacttagaaaccatactttatgcggcaggagaaatgggtcagcagttaagaacactggctgctcttccagagaaactgggttcagttcccagtccccacatggtggctcacaggcatgcacatgttgcacagacatacatgcagatgaaacacccatacatataaaaataaaaaataaaaattaaaggaaaataaattggactttattataggtgtatgtataggaaaaaaacagagtgtggttccccgggtttcaggtatccacaggatgtcttagcatccccaaggacaagagagttctgtgtggaatgttctatggagcaagttagtcctactaccctcttatgattcacttgaacaatggtggttttgaaaagtaatgcttaagtataatatgcatgcacataaaatttttgcatatatttgcatatctaagtatttgtatgaagttaccttagcacctgggtactttggaaagaaatatgattctacaaatttggaacacaagaaataccactgcttcttctctatagtccaaactcagtgcttagtcctgagccctcacctggctcataagagaagtgaagcccttccctgccttccctggtgtgctgtgaataaagtttcatctcgccaacctgcagagaaggaagggactgggcccacttctcctcccagctgccctgtttgtaggctttgaagaagccgttgcctttcccaattaagaaagggctctggttactagagaatgggttgataattcagacaccagtttcagtgctagaagttttcttccagggctctgtctctgtctctgtctctgtctctgtctctgtctctgtctctgtctctctctctctctctctctgtgtgtgtgtgtgtgtgtgtgtgtgtgtgtgtgtgtgtgtgtgtgtgtgtagctctggctatcctggaactcactgtgtagactaggctgatctagatctcaaagatccacctgtgtctgtcttcagagtgctgggattcaaggcatgtgtcaccatgctcagtgctccaagacaaatcttaaaaggtctgctgtcctcttctgaaggagcattgggtcaccaagtgaggcgcccctgagttttctcctgagctgtgaaccccagttctcatctcctgcagcatgcattgttttccagtgcaggcacactcatccattactttgcccaagcttattcacgctggaactcatagaggattaaaggtcttttatcagttacatgtcgtgttggagcctggttatctctggcactggagcacagtatccagtgggagaggagtagagagctagaggcaggggagattttcatcatcttcttcgagaaccatttaacaagagtttcgtggaaacctatccttgaatgcactctaaaaggtaaaacagctggaaagtataccatgcctcactttttagagtctggacactcttaggcaaagtccttgaaaccctgactaccatttgaaaagatggggaggcaagacagggtcatgaataatcaaggagttaacatccagaaagatacttcagcctttaagattgctgggggaggggcatgctggagagatggctcaaatgttgaaagtcttgaatgctcctcctgaggacctgggttccattcccagcacccacatggcagctcagttctgaggagtctaacaccctcacacagacatacaggcaaaacgccaatgcacataaaataaaaatgaataaattatcactttaaaaaaagagcttgtactgctcttgctgaagacctagttacctttacacaaaaggtaactaggctgtggctcacaaccccctgcaaccccaggtctggaacttctaacctccacaggtgcctacattcagatgtccatacacacatacagacactcactcacatatagttcaagatgtttttaagagagcagtagcattgtcatcctccacccccaccccatccccagtaacagacagagcctcagagataaggagtttctatgaaagcagagagcattgcgatggaattgtggtttttttggtagccatgagcaattttaaagaggttggcacatggggtactttttgaatgaaaattgaggaagcttgctgagttattttgaagcaataacccttgacctaaaagatgagaagcaggaacagcactaggccaagattgacagttaccagccagaatttatatgcagaaactcgagggatctcctaccgttcgtatagcatacattatacgaagttatatatgtcataaaacttatgctaaaatatgtgttataaaacatatgctaacataatttagataaagatgctagattcaggtttccttccctgtactccaaagaagcaggtatcttccagcctccagggcacgcaccttccttccttgcaggacgcatttccacactgtgtgagtgaaccagaagcaggaccatctctacagctgagagcaggccctgctcctgtatggtgactctcatgctcaggggtgactgtttactgccttcacacttggctctaccccaagtccccaaagtcatcttgcttctttatgtatttcctggtttaatactttcctccctgacccgacaccacaggctggtgtttctgtcctggccatgaatggggcaagacatgaatatacctgattgtcttccacatgttgaagccatccagaggtttggttccattagtgcttcccccagccagatctacgagtgtggggagccaatcggtgatgtgcatgagttcccggctcttcacgcctttctgtttcagcaaggggcttgccacgaagcccgttcctcggatgcccccttcccacagggtccccttccttcctcggagtggccagttgttgcctccagacctagtctgcccaccgttatctgaaacacaggtaagccttggcatgagtacatgaaagttagcaaaatggcgtcacttgtgtcacaccatcacaggcaagaacataatgggtgaagctaaggttatgaaaagagggggctctcatgcgcatatgccatttgatgagaacgagctcagaggactttacagaaccacgatcttgagggggcaggggtggaagagggcatgttacctcacgatcttgaggggacaggggtggaagagggcatgttacctcacgatcttgagggggcaggggtggaagagggcatgttacctcacgatcttgagggggcaggggtggaagagggtatgttacctcacgatcttgagggggcaggggtggaagagggcatgttacctcacgatcttgagggggcaggggtggaagagggcatgttacctcacgatcttgagggggcaggggtggaagagggcatgttaccttattcaagaataatcccagtcatagctgtccctcttctctttaccgttcgtataatgtatgctatacgaagttatgtcgagtaactttaaataatgccaattatttaaagttagccagtagcagcacccacgtccaccttctgtctagtaatgtccaacacctccctcagtccaaacactgctctgcatccatgtggctcccatttatacctgaagcacttgatggggcctcaatgttttactagagcccacccccctgcaactctgagaccctctggatttgtctgtcagtgcctcactggggcgttggataatttcttaaaaggtcaagttccctcagcagcattctctgagcagtctgaagatgtgtgcttttcacagttcaaatccatgtggctgtttcacccacctgcctggccttgggttatctatcaggacctagcctagaagcaggtgtgtggcacttaacacctaagctgagtgactaactgaacactcaagtggatgccatctttgtcacttcttgactgtgacacaagcaactcctgatgccaaagccctgcccacccctctcatgcccatatttggacatggtacaggtcctcactggccatggtctgtgaggtcctggtcctctttgacttcataattcctaggggccactagtatctataagaggaagagggtgctggctcccaggccacagcccacaaaattccacctgctcacaggttggctggctcgacccaggtggtgtcccctgctctgagccagctcccggccaagccagcaccgccaccatgggaacccccaagaagaagaggaaggtgtccgagctgatcattagcggatcttcgggtggcttcttaaggaatatcggaaaggagtaccaagaagccgctgaaaactttatgcgatttatgaacgatcagggagcttacgcccctaatacgctccgggatctgcggctcgtgttccattcatgggctaggtggtgccacgccaggcagctcgcgtggtttcctatctcgcccgagatggcccgggaatacttcctccaattacatgatgctgacttggcctctaccaccatcgacaagcattacgcaatgctgaacatgctgctctcgcattgtggtctgcctccgctgtctgacgataagtctgtgtcccttgccatgcgacgaatcagacgggaggcagctaccgaaaagggggagcgaactgggcaggtaaatataaaatttttaagtgtataatgatgttaaactactgattctaattgtttgtgtattttaggccataccactgcgctgggacgatctcaagctattggacgtgcttctttcaagatccgaaagactggttgatctgcgcaaccgggcattcctgtttgttgcctacaacacgctgatgaggatgagcgagatctcaaggatcagagtgggcgatctggaccagaccggcgataccgtaaccctgcacatctcgcacacaaaaaccatcacaacagcggcaggactggacaaggtgctttctagaagaactactgctgttttgaacgattggctggacgtgtctggccttagggagcatcccgatgcggtgctgtttcctcccatccacagaagtaacaaagctaggatcaccactaccccccttacagctcctgctatggaaaagatcttctcagacgcgtgggtgttgctgaataagcgagatgctaccccaaataaaggtcggtacaggacctggaccggccacagtgcccgagttggggcagctatcgatatggccgagaaacaggtgtctatggtggagatcatgcaagaaggtacgtggaagaaacctgaaaccctgatgcggtatttgcggagaggcggtgtatctgtgggtgcaaattcacggctgatggattcctgaaccggtgtaatgatcataatcagccatatcacatctgtagaggttttacttgctttaaaaaacctcccacacctccccctgaacctgaaacataaaatgaatgcaattgttgttgttaacttgtttattgcagcttataatggttacaaataaagcaatagcatcacaaatttcacaaataaagcatttttttcactgcattctagttgtggtttgtccaaactcatcaatgtatcttatcatgtctggatccccatgcatggcctccgcgccgggttttggcgcctcccgcgggcgcccccctcctcacggcgagcgctgccacgtcagacgaagggcgcagcgagcgtcctgatccttccgcccggacgctcaggacagcggcccgctgctcataagactcggccttagaaccccagtatcagcagaaggacattttaggacgggacttgggtgactctagggcactggttttctttccagagagcggaacaggcgaggaaaagtagtcccttctcggcgattctgcggagggatctccgtggggcggtgaacgccgatgattatataaggacgcgccgggtgtggcacagctagttccgtcgcagccgggatttgggtcgcggttcttgtttgtggatcgctgtgatcgtcacttggtgagtagcgggctgctgggctggccggggctttcgtggccgccgggccgctcggtgggacggaagcgtgtggagagaccgccaagggctgtagtctgggtccgcgagcaaggttgccctgaactgggggttggggggagcgcagcaaaatggcggctgttcccgagtcttgaatggaagacgcttgtgaggcgggctgtgaggtcgttgaaacaaggtggggggcatggtgggcggcaagaacccaaggtcttgaggccttcgctaatgcgggaaagctcttattcgggtgagatgggctggggcaccatctggggaccctgacgtgaagtttgtcactgactggagaactcggtttgtcgtctgttgcgggggcggcagttatggcggtgccgttgggcagtgcacccgtacctttgggagcgcgcgccctcgtcgtgtcgtgacgtcacccgttctgttggcttataatgcagggtggggccacctgccggtaggtgtgcggtaggcttttctccgtcgcaggacgcagggttcgggcctagggtaggctctcctgaatcgacaggcgccggacctctggtgaggggagggataagtgaggcgtcagtttctttggtcggttttatgtacctatcttcttaagtagctgaagctccggttttgaactatgcgctcggggttggcgagtgtgttttgtgaagttttttaggcaccttttgaaatgtaatcatttgggtcaatatgtaattttcagtgttagactagtaaattgtccgctaaattctggccgtttttggcttttttgttagacgtgttgacaattaatcatcggcatagtatatcggcatagtataatacgacaaggtgaggaactaaaccatgggatcggccattgaacaagatggattgcacgcaggttctccggccgcttgggtggagaggctattcggctatgactgggcacaacagacaatcggctgctctgatgccgccgtgttccggctgtcagcgcaggggcgcccggttctttttgtcaagaccgacctgtccggtgccctgaatgaactgcaggacgaggcagcgcggctatcgtggctggccacgacgggcgttccttgcgcagctgtgctcgacgttgtcactgaagcgggaagggactggctgctattgggcgaagtgccggggcaggatctcctgtcatctcaccttgctcctgccgagaaagtatccatcatggctgatgcaatgcggcggctgcatacgcttgatccggctacctgcccattcgaccaccaagcgaaacatcgcatcgagcgagcacgtactcggatggaagccggtcttgtcgatcaggatgatctggacgaagagcatcaggggctcgcgccagccgaactgttcgccaggctcaaggcgcgcatgcccgacggcgatgatctcgtcgtgacccatggcgatgcctgcttgccgaatatcatggtggaaaatggccgcttttctggattcatcgactgtggccggctgggtgtggcggaccgctatcaggacatagcgttggctacccgtgatattgctgaagagcttggcggcgaatgggctgaccgcttcctcgtgctttacggtatcgccgctcccgattcgcagcgcatcgccttctatcgccttcttgacgagttcttctgaggggatccgctgtaagtctgcagaaattgatgatctattaaacaataaagatgtccactaaaatggaagtttttcctgtcatactttgttaagaagggtgagaacagagtacctacattttgaatggaaggattggagctacgggggtgggggtggggtgggattagataaatgcctgctctttactgaaggctctttactattgctttatgataatgtttcatagttggatatcataatttaaacaagcaaaaccaaattaagggccagctcattcctcccactcatgatctatagatctatagatctctcgtgggatcattgtttttctcttgattcccactttgtggttctaagtactgtggtttccaaatgtgtcagtttcatagcctgaagaacgagatcagcagcctctgttccacatacacttcattctcagtattgttttgccaagttctaattccatcagacctcgacctgcagccgctaggtaactttaaataatgccaattatttaaagttatgtacataactataacggtcctaaggtagcgagctagcgtccagtttacacataaaatcacatgtactggaagcaaatgactattgctgtgcctttcagcctctttggtgtgctgagctcggtttggggtgtctggttggaagtcctccttgtggtcctccttgtgcatcttccacatttttctcagttcaaaataatggagtttttgggtttctatacataggaaatccacaatagaggacttagacgtaaggagccagggtgtacatggttcataaaaaggttgtgtgtatgtgtgctttgtgtctggggtggatttaaggctccagtattagcaatctgagaagataggtaaggagcatagatggtcttgtactatgagttttttacaactttttataaattgaaattatttccaaataaagtgttttgttttgttttgttttgttttgttttgttttgttttgttttgttttgttttaaatagaaaggtctggcagtatttggcctgaatttccacaagactagccagtgaatggaatcagatagtggcagtcttctttagttgagtgttgactttccaagttacctttttccagtgcccctggctgctttgccctctggccggctgcactcgccggtgaaacccaccacatccctagccatgttacccatgttcacagagttgtggtaccaacactgcacatgctctaaatgagccaatcccccactgctggccatattgcttcttttctttttagtattctcttttttaaaaatcattttaatgtctaaaaaatagggggatgctgggatatctccttaggtaaaggtgcttgctgcaagcctgacagcctgggtttgatccccaagacccatgtggtaaaagaggagagagagagacagctgacatgtatgtgcaggcggaaagtggccccaggaaggctgcccagcagggagtcagtgttaactcaggaatcttggaggggaatgtgtgttagccacgtggagttagggagtcctccagccatggagctacttagggcttcttaaaaataagtctctctctctctctgtgtctctgtctctgtctctgtctctctctctctctctctctctctctctctctctctctctgtgtgtgtgtgtatgtgtgtgtgtgtgtgtgtgtgtgtgtgtttcattcgggaatccaaaacatctggcaggtggtgagcacaccacacccccttgccggggagtttagagtggattaacaattattgcctcaacatcttatttaatatctttattaagagctgtttgaaaaaagtaggcttttaaaaagttctaaattttcattataaattaaaaattaatttcattttttaaaatctcaatttggtcatttctaaaacaatatacaaaagtacattgagaaaaacaagaccttgttgtattatatccaaaaagaaaaatctgtaagtaaagccaacggtaatgaaaaagccccgcaatacacacccaaaccaggcaatcctgattctctgccaacaggcagagagcaagcctgccactgcagccgggtcagtcctcatctcagggttgcacattctcttctcagtagatgatggtagagatgataaattgctctcttctctgtcctgctctgttcatccttgggaggggacaagctcacagctggtgggacagctgtctgtcacatttgcaccagggattgaagctgcagggagctgtgttactgacctcagggttcatcaccctggtttttcttgatctctctaggctgtctagagagggaagtgctacaatattatggtctgtaatccccagccatcgcagcgtatcctgtgacactggcttgcctggctgtaatctccaacgcttcagcctgcacagggaggttgccacatcaggtctctgtatgtagtaagtggatccttcacccgagttagggccaatatgctagtcctagacgtagagagtgccctgtaagccccaccccattccttttgtcatctttggcaatgctcgtggtatggaggaccatagatgtggataacataaagcagctaccatctgtgaccttatagagaaactctacccctgcctctctctgctgccccatctcccttctcaccctccacccaccctgcacacccttccatctcttgcttccacacacatggacccatgtgtgcattcacacgcattcaaatatgcacacacacacatactctctctctctctcttgcatgcacgcacttatgctcgagaccacacacatgcaaaaataagtaaagaaaatatgaacaaagctgcttggttctgatgtgctcacactgtggcatgctgggagcccattcagtttttatttttgctttgtttcatattagatatgtatactagttctgtggtacattttggtcattctgagaaaattcctttgttcctgatccatgggctgttattttgggtacagttcacatcattgatgtttatctatatcaccagattttaggtgataaacccatatttcattaagactacctcaatcaggagtgacctttaagagtctggtttctatgtgcagagaaattggcacaatatgtggtcaccatataactccaagttgccgtctttctttagcactagaatattctcttgctgatcaactccttaggtgctctgggttctttgggactgttaccaaaactatggccaagtatgatgtattgtaagtgggcttccttttctgctgttttttttttctaaagtcagattagtgtctacagtttaatcaaacatttccaggctcgctctgttaaaaatctagcaaattcgtattccataagtgaagaatgactttcaatcttatcattcttgaaaaaaacaacaacaacaaaaaaaaaaccaacaacaacaaaaatcctgcttctgcccctggctccatgtaagtgtttccacatcagtggcagcaggtacagagaaagtggccagtcacattggagttggatccaccttcccaacgcagcacaaacaagtggccagccaagtgtcagacacctgatctatgcccagagccgatggaagatttttttccagacatggaaaaatcatttttttaagacgatgttggttttttcagctctcagcagaggtgcatgaagtgggcatgacagtaatggatggaagtcagcaatggccagtgcagcagaagcccccgtctgtgtgtagacataaattcttcttaatcttgcttcaaatgttaaacttcaaagagaagtatcaagaaccctagggttgtcctaccttgttttctattgctgtgatataacacggtgaccaaaagggccttggggagaaaagggttgatttggtttctactcccagatcacgatcatcacagaggggatgcagggcaggagtgtgaagctgaaaccatgcctgctgcttaccaggtgctcactgaatcatgctttgcaagttttcattacagcccagcaccaccaccttagggatagtgctgcccacagtgggcctggctcttctgcatcaattcttaatggagacaattattgcgggaaatattaaaaaaatgaactggcacattcccttgctagtgctggcaactggcagggcacgaggctcctgctgggtgatctcactcggaggaggtccctctgcctgccatctctccagcggggaggttgggggagggcgagttcctctcactatcatgcaacaccccacacaccccatggtcagccatctcaataccttattacccagtagaatcaaaactcttaaagcttatgattatggttaactaatcagatttatgtatcaataaaaatcacaatttacaagatgccagtacaataattttagagccaattagtaataataaaagctttatcccaagtgtgctaaggattatgaaatcatcaggtcagcctccattctcctcccctttctctcctctgttccccttctctgcaactcttagctccgcctcccttttccctgtccaatcacaggcctcctctgcactaatgtaattggacgggaaaatcttgtgatagacaatagctatgccaggaggaattccgcaatggaaactttcctctcagctgactctaggctgtgccaggttgacagttaaagctcagcgggacagtgatgtcatttctctccctcccaggagcactcagcacttggacctgccaggttaagcagaggagacagaataccatgatggcaagtgtgtgcgaaagaggcagctgttcacttcatagcagccagtagaagaagagggcaagaccaagacatagctttcacatacacttactcagagactcgtgtcctccgctgaggccccaccctccagacatgcatcacttcccagtggtcgcatcagattttggatctgtcagtggattaaaccgtgtgtttaggtcagagccctcatgatttaatctttcctgaaaacactgaaaagtgtatgttactaatcttctagacatcttttttaatccaatcaagttcacagccagtcttcaagtttatcatcttctctcaaagcccaatcaccagttaagtacagatggtttgttttccatctcacactttggtacttttactgctaaaagttaaactctggtctcttaactaaactccttggacacatacaatatcatcgccgtagtgcagcaaccgtgaactagcaagcaattccagcatgcatgtcttttccaggtggctgtgactagttggtcatcctctttatgggtccccttcccatgccaatcatctttgattcaacgtcaagcatcacaaatttacgttggtgactgccagcctttctatattcttatgactcttcttgcttcggtcagaggtgtagttgtcagttcatttatttgagtgatgcttttctgaaaaatacattttaaaatttactctttgagaatttcatgtaaatacacagtgtattttgatcatgtctacccctcagttccccaaacttccaaatccccaccaccacatcctatctctcaatacttcatgtccttcctccttttatataatccattgagtacagttagttctgtctatatgctcaggggtgtagggccatctattgagcatggtcgacctaccaggagctgatgaaaactgacttttccttccttgacagtcattagttgccaaaagcaccccagctagagatgggttcttgtgagttcctccctgaccagtgctggaattttgactggcttgattttgtccatgtcttaggcaggtagccacacctgccacgagttcataaaagcaacactagttatgtccagaaaacactgcttcgtagcaggccttcccaatcgctgttcttccagtctttctgccctctcaatggtggtatatagacatttgagataagcctattgtgtaatagtggcatgaatgttgtggaggtaaccaactgctttctgattgggtttcaggcctaatccacaggacagaacttatacctagtactgtaagcatggccaagagcccatgactgacaagatcataaaccccgtgtgagaatctactactatcattttgctacatgatcatagtatcaaattgccttctaagtacttgtgatggtttatatatgctccactcaggcagtggcactattaagaggtgtggccttgttggagtaggtgtgtcactgtggagatgggcttaaccctcaatccagctgctcagaagcaagtattctgctagcaaccttcaaatgaaaatgtagaactcccagttcctcctgcaccatacctgcatggatgctgccatgctcccaccttgatgataatggactgaacctctgaacctgaaagccagccccaattaaatgttgttcttataagagtccccttggtcatcatttgtgttcacagaagtaaaaccctaactaagacagtacccatcttcatatccatagattagtgcagttctcagccctatcagagaagctgctttttctagtgatgggcagctaatgctaagtaacgcttttgtgacttaattaagcaggcttgggacagtacttactctggggccagttattccctagcacagagtcaaagccttctgtgcccattgctggatgagctatgagtacttccggtctgggacaccacgagctgttctcacctggtgttgacatggtccctttcaacctttcagatgggtttctcctggtagtaagttgtagttaacaatactctaagggatcctctgcaaagttcctagattctacttatttagctttctcttctctggagctctcttccttggactctttgggctttgagctctgtgtctttaatttggggagtctgccaggccccctttcttcctttcttccgctagcacttagaaactccctcaggctggggtagttgcgtggcttagtttttcccacccatcaggcatcactgcctctgacagctgtctagtgttttgctttatacattctatctggtttttgtcctttgtttttgagttgtttaggaatgatagtaaataaatcccatttgcccatttctctgtcttagctaaaaacagaaataaccaataagaaatcgattgtgccctttatttcattgtgtctaccttactttccattttcatgagttctagtttctccctcccatagtaaaaggaggtacttttggtgttttagtcctttgaattctagacttggtccctggaccacactacatgttctggagaagatggtatattatgtagcaatcagttatagttcttgttttgctttacggtgaaatgtgagcatgttttactctgttggtgtcctggctggttttgtgtgtcaacacaagctggagttatcccagagaaaggcgcctcccttgaggaaatgcctccatgaggtccagctgtaagacattttctcaattagtgatcaaggcggggagggcccaggtagtcctgggttctataagaaagcaagctgagcaagccagaggaagcaagccagtaagcagcacctctcattggcctctgcatcagctcctgcctccaagttcctaccctatgtgagttcctgtcctgacttcctttggtgatgaacagcaatgtggaagtgtaagctgaataaaccctttcctccctaacttgccttttggtcatgatgttttgtgcaggaatagaaactctaagacaattggggtaacttttatttacctgtatgttactacaattgtcattttaattcttagctttgtcattttgtttaatgttctcctgatacctcatatttgttagcaatcttaatattttgagcagtttgtattttcttcaatcgctcaccaatatccttctgtcattcagtaattctcttatccataagggactccccgagcttgttcagccttaacctttctacttcctagatcgtctagctttattattaagtttgctatttctactttgtcagagcatgtaatatggaatactgtgttctcctagccacagttttgttccacaattagaccttcaatattacacttaatactagacagccatttctgaagcatccaccacaattgtcttttcattgaaagaattttcctcagataaatttctcaggattctttagattcttatatgcctatcagaaacatttttcataagcttaataattgaagaatatctcaaatgattaaaaaaaatcctttgtctcatactgtcttccctcgggttttaaaactgttatccgtgtctttgcttgtttcatatgttgctatggatcaatctaatttccacccaatttaattttcttggcaagggacaggtcctttcatttggaggcccaggagattgttattgtcactgttgtgacaaagactggttagttatgtctcagaggtgacccattctgggtcacagacaaagtaggttctttcagttatacatccaggcctttcattcaagatgtttacagttgggtttaaacactgtcttccactatttcattttcttcttcaggagctccagctgtacatttttggatcttctggcagtttttgtctgacctcttaaaaaattatcttctctttttatttctcttctctctctgccttcacatactttgagttactgtcatgtccctagtttctgagagtttttctttctgctgctgctgctgctgctgtttcttctttctttctttctttctttctttctttctttctttctttccttccttccttccttctttcttcctcaaaaagttgcagatacattttttaaaagaattatttacttattttatgtatatgagtagctgtcttcagacacaccagaagagggcatcggatcccatcaccatatggttgctgggaattgaactcaggacccctggaagagcagccagtgctcttaaccactgagccatctctccagcaccttcttttttctctagatagtgcatgcactgtggtcctgctgcctgagacccactgtgtagttgatgctgggttcaagcaggctacggtaatgctacttcagctctggattataggactgagcaccatgctagtcttgcttattgatttcttcatctcattttcttcccttaggtcagtacctaaggtcagtacttagggattttgaatttccagttcctgatgttttttgtgtttaattctactcagaaggttgagactcgatactacagttttcatctatccacagttactgaattaattatgtttgcttcatgctgaaataccatgtgacagttttcctctgattgtgtctttctttccatagtaggaaagtagtttccatttgccaaatgttttgaattctcgttgctgtatctttttcaatttccctggaaactcgggactcttatctgtcgccttgtccttgttcgggtgtgtttgctttttttttcctagacctgcgatagtagaccatccactggggtgggatttgggtactttaatttcttcctcaattcaaaagaaatctcagagtgaagtgtgtcggctcatacctgtagtctcagccctgtgacaggagaccactggcacgctgaaggcgaactgggctgcagttttagaacagcctcagctgcagaggaggagcccacttacaaactccgggagaaaaagagaagaaaatcgcctgactgtggcagagccagatggtttctgtgatgatgctgcctccttgccgtggtttgccctcccttgaactgctgatgggctgactgacgagtagcagaacctgttttccagccacttctacctttgctatccgtcgtctaagaagataccgttcttctctcttggtggcgtgggccatcactgagatctttgcctacactctcaagccacctttctctccaactacccaaaggcccctatcccagcggtgtctgggcagaaccacatccgagcctctgttccagcccctgccatttctcacccagagaaacacaggttgaaccctagcttagactgtatccccccccaacacacacagcagtgtcagcagcccacagtgacaaggaagaaacaaggcttaacaccccagttctttttggcatcccagcagtgagacagagatgcagaaaacagtagcattaattgactgttttgattcccttctatattaccgtgtctgtgctcgcagcatgctgtactttaagggtctttccccatagtgtagtctgtatctcattctaggaagctacatggcacaccatcttgctcttttgccatttgctgcctgtatggatatcaacaagggagccaatgaaaatggacacagagctaccatctctgagaacagtcagtgggtgatcactgcccgtttttgtcttgtgtagacccttcttggtgaggctggaggtagataaagtggatgcctttttaaaaaactttctttggatcaggttttgatccttattgtagatccaaaactatgctgttagtctcgccagcatggcgttgctaacgtcccctcaggacactggcagcgggcctcctgcctcctgccaacactgctgccagctctcatcttctgaaaattcttcatagtaaaatagaaattggaagaagggcttcttatcccctatggcttgccttgctactaacccaagagtctggcccattgcattttagtaatcaatacgaaaagagttattaagagttttgagattatgatgttttgagaattactttttccttgagtattctactttaaaaacttaataagctccttaataaaaataaatagtaatgcaaaatatctccccatcctctagcaaataaattcaacttacatttccttaccagattttgtctaaattttataatccccatgcctaacctcttttcttatggtaatgtttgcatgttacagggattttcaaggaacgtgggtcttacatagagccaatacccacccacccatccacaagcagtgaataaaatacgtcctgttagtgatttccccagagtaatagtttcaaatgtgtactttgtggtcagctctggttcaaatctcatctcctgtgtttattattcatgtgctgactaaaatctccaggcatcaatttcatcgtgcgccagacgtgacccagtctgggaatggagctcagggggacagcagttgcctagcacacagtaggcagttgcctagcacacagtaggaaggctctgggttcaatccatagctctgcaaaaatccggttagttaaaataatgtgtgagcacagcggtaccatcttgttagcactcacagcagagtccaggagaaatgtatgagaacacagcacagggcctgggtcgggaggagtttaggagctgctgaggaaggtgtccgagctcgcacatgcgtgggaattacccctgcaggactcttcgtgtttttagcagcaactagtttgggttggtttgtttgtttccttcaaactttctcagaaactcttgatatttccttttctaggatgtgtcttttgtgacagatagtaagcatttagcaataaaaggaggagtaatataatcacatctcgttttttgtgtgggaaggatttgctgtcttacccttcaacatggagcacaatggctgtcaaaagctggggactttgtaaatggatactgatgtgacctcaaggtctgaaactctggagtcctataatgcattaagacaggtggtcactgggcaaggcctcttcatcctatgtcaaataaagctaatatagaaaatatgaactttaaggtgagtttaaatggaaatattgaaaagtcaccaacgacagcagcattttattttgtcagtcatatgagagaaaaaatggagaaaataaatggcatgtttgttaatttgcggttaaaggttagggtttctgatgccgtgataaaacaccatgaccagaaagaagcaagcttgggagggaaggatttgtttctcttatacttccacttcttggtccattattgaaggaagctggaggcaggaagtctgatgcagaggccatggtgcctactggcttgttctccgtggcttgctcatcctgctttcttaggacacccaggatccagagcctatgggtggcaccactcacactgaactgggcccacagcagtcattaatcaagacaaggtctctcaggctttcttcagacaaaccggcagggcattttctcaattgaggttctcttatcccaaatgactctagcctctgtcaagttgacatgaagctagcctgcataaaggtatttgtttatggaatcataaaagtaagctagatgtatggcataatacattcaaaagatcctggggctataggtaaacatttcactatggagacagtatagcattgaggttaggagtggagattaggaaatccatcagcctgagtttcaaacccagttccaacatctgctcaaacaggggccatgttagtaactgtcataattaaggtttccattgctgtgaagagacactatgaccatggcaactcttatgaaggaagacattcagttggggttggcttatagatcagaggtttagtccattatcatcatggtgggaagcatggtggtgtgcaggcagatatggtacaagagaagttactgagagttctatgtcatgatccataggcagcagtattctacactgggcatagtttgaacataggataccccaaagcctacacaacagtgacacaattcctccaacaaggccacacctactccaacaaggtcacacctcctaatagtgcccctccctatgggccaagcattcaaacacatgagtctttgtgggccatacctatccaaactaccactacctaaccaatcgccctagccaaggttgggtctgtggtattgaaaattaaataagattaatatatgtcaagtattttaaacttttataagtttgattgtatttattattattaataataataattattattattttgcgtgtgtgtgtgtgtgtacactcacatacatatatgaacgccataagacagcattcaataccatggaactggagttacaggtggttgagagctacccagtctgggtgctagaaactaaatatgagacctctgcaagattagcaagcagtcttaactgctgagcaatctcccctggggcaagcattttaaagtctgtatcagagtttctagttttcaatcaagccttgccaaacaatcaagagcctaagctagccctagtctgcttgttcagggcatggatgagacatcccctgtgtggttgaggggtgtcctcagtggttagaggtaaacaaagtggttctgtttttttcttaccttggctctctatttcctgctgtggctggccattctcacaggccctgaagcggtgagcacagcacagtcatgttgtctgagctccactgtaataaaagcaaccattgcttggagtcacataagatcaggtgtatgattaaaatatgtttttttcccacaaacatcagcagccatgattgaaagatgggatttcccagatggtattcatagcctgttggaggcaatattacttaagcagctaaactttcactacctgttcgaatgcctccaaataaggaaaagtcataggtaggtcctggagtgatggctcaactacaaagtgcaccgacctctcttccagaggtcctgagttcaattcccagcaatcacgtggtgttatagacattttggggctggagagatggttgagtggttaaaagcactgactgttcttccagaggttctgagttcaattcccaacaaccacatggtggctcacaaccatctgtaatggaatctgatgccctcttctggtgtgtgtctgaagacagctacagtgtactcatataaataaaaataaataaataatattttttaaaagtagtttaaaaaatttcataggtagcagattgcatctcatctttttaactgtggagtttgtaatgagtaggctgaattaacatgatgtgttaacatgataaatgggaggtgctctctcatacaagagagaacattacatgtcctagaaattaaagttaactactatctgactctattttataaacagaatgcagaagttatggttcagcatctattgacttttatctgtgactcagaatatggtcttgggtcattggttattttctcttacaaatattcactctctattatttcccagacaaaatgtataaggcttgcagaagtctttgagatttctcagttcaccaccctcccatcccaggcccccatccacagatccacacccatgttcaagaaacgcacgtgtgcttggcctctagtctctactgaaatcaatgcgatggattttagattgggttttacttttatgaaccgaagtcttgttatgtagctcaggctagcctgaaactcatggtctttcagcttcagactcttgagctactaggattataggcacatattctaccacacccatcaatgccttcctgaaatgatgctgtttaaagagacagtccttttaatgcacctgtactgataatctactttgtaactatggatagaaattacacagcccctcccaccacctatcctcgcccctgttttctcttcctttctaggaatttcctttttcctatcttttaactcctcccaatcctaagcattgagaccctgaaccctttactgaaggcaaaagaagtgaattcagcaatggaacttgagactgtgtggccctaaagctgttgcaatttctaactacagataaaggcaatcttgttcaaagacctgcatggagacttcaagactcctgagagggaaagcacacttgatagattataaataggtagaatacaactaaatcccaaatattaactaatgcattctaacactacccatatattgtatttgttgaaatggctaattgtccggtctttaacctcttaaacacttgagcgcctgagtttttgcctcgttactgttttaagtgttgtatttgtgccatcctgaacatttccacagacagtacatttattgtggttgttattgctgctgctgctgttgatgtgggggaatgttagttcagggtgacctcaaactcagatttctcctcctcctcctcctcctcctcctcctcctcctcctcctcctcctcctcctcctcctcctcctcctcctcttcttcttcttctgctccttcttcttcttcttcttcttcttcttcttcttcttcttcttcttcttcttcttcttcttcttcttcttcttcttcttcttcctcttttgttttttttgagacagggtttctttgtgtagccctggctccggctgtcctggaacttactctgtagaccaggctggcctcaaactcagaaatccccctgtctctgcctcccaagtgctgggattaaaagtgtgtgccaccactgcctggtgaatactggcaaagcaaatgatatcgccatttagctgatatcagagtttgacgtgtacaagtaacagtcttgttaagaagctatgggatgccagggcatcgggcatacttttctaaactattgttgaaatgtttctgaacatttttaaataatcatctgtaggtctctaaaatttatccctttccaaagggaattattacatggtgagacatatatgacttattatatgtcttgagattttacatggttttaagatgatgcaacccaagatttatattttactcaattctcataaatgtcatttaaaaaaaaataatctggagtcactaagtatatttggcattgttttaagtacttgtcacatgttgtattttcctggcatgtcttttaaccacatccccactaaaatatcttgattagcatattttaaaagtggaatcataacacactgtgacagtcggggatttggagatcctattggcatcatgagaattctgcctgggaagaattttcccaaggaatagtcaacaagggttgtccacaacctccaggattcagaaagtcacctcatcttactacgttgataagatgtatctactacagaattattagaaaagtatcctttacttattcatgcctaatattttgggatagtcagggcagctatggttttaaggatgagtagtcacacagcaatggagaacctgaagtttagaggagttctttcatcattcctgacttcttttgaattgaatgaacagttcacattttctgtagtcctgaaaacatagttttccctaaaaacatataaattttacttggttatatcttaattaaatcaatagttctcttctgaaaccaatgcagacatactgcttttgttctgacacccctcctgactttcttattattgttattcaagtttgggttttttttctgcacaagacaccaccaccaacaacaacaatctgttcatgctttcaaagatttattactactactattattattattattatttattattattattattattattattattattattattattattattgtataagtatgtgcacatgagtgaaggcactcacagaggcaatgccttggagctagacttaaagacctgacacggttgctgggaattgaacccaggtcctctggaggagcagtgcatgctcatagttgctggacctcctctccagcccctgttcatgtttcctttgcacatcttcccttccttacattcagagcctctgggaccaaacccagctaggactgtcagtctccagaatctataagtaggcagttaggtgtttgggggagaaaaaggaaagactggaatctaaggagatatgccttgctctcaacaccaactcatcttcaatgttggccctaggaactaaggactggggacatcctacatgagtattgtccctaaagcctaggtgtgtctttaagttatttgcctctactctctagtgggggtatgttatgggagtaaagagcaatgaactcttgtaagctactctcattaaatatgtctgggttgtatccttcctgctaggggtgtgtgtgtgtgtgtgtgtgtgtgtgtgtgtatgtgtgtgtgcatgaaattaacattatttagcaaacaatggcaatgatagttgaagttcttttgatttggttttaaatttattaattccattttaatattttcttacttgaaaaataccaagttgcagatcacactttttgaagttttgctgtccttgaactctaaaataactactataaacaactagctgtgtgtttgggtgtagacattgggcggtctgggaaatgtgtcttctcggttatttaagagcttcatcatgtactcacgctgtgtacaagtcctgtgatggtaacagcatttggtgccagcagtgtacagcaggggtcctggatcagcacgtatccccagctgccttctgatggtcaacactgatccacagtttccggaaggttgagacaatctgaccagttttttagaaaacactgctttcaaagttacacagcccaatactctttcagtaacttgtaagataatttctctcctgtctaaatgacatcaatttgttctttgttcaatatcaatttgttcaatatagccaatatgttcatatgtggctatggctatatgtgctttcaaaaaaagttttaaaggcatgtgtttaactcatatctctattaaatctgtgatccaggcatggtggcacaagcatacaaccctagaacttctgcaggaagatcaggagctagaggccagcctttgctatatagcaagttccaagtcagcctgggccacaggagacgctgactcaattaattaatcagttaattaattaattaaaaatagatctgtgatcctttcggctgcaagaaagatataaagatcaagacatagctgatgttgaggccactacatttccacttttggtcacctttctgaaagatgttcttcatttcttcccatatagtcagtatgacgtcattacagatgacttgagtcctaagcctcttctataaagaatggtcgcattgaaatatagccacaatgtcatcctatgtctgatgctgacatttgtatgtggggttttctgtgattattataatatagacaaatgacctcatgatgatccactagccacagtggcagatttgttcttttctataggcactacgaaaggaagtcataaaataatgcatacccatttgagaagaatgtaacacttcctaaaaactgttttccagtgaaggacacccatccccgagagtggagctgctacacaacatcgatcaggacttttttgatggcttgccatgtgagtacccagccattgccgccatgttaattgtttggtttctggttttagtagatactgtaactctagccggaattgcaattatgacaaacgtttctccctgatacttgtgctagtaatctcatggtgacatcagtattcttcgacgtcagtaaactctggctctgccatttgctggctgtatggagcaaagcccacaagacccccgaggcccttttccaaaaccaatctcatgtcattgtctatgtcacctggaagttccagaacattttcccagagaattcaccatcaaacaaaccactgtccagctctggggttttgtggggcaccagagcatctgactggattggcaggatgctgacacacccaccgaacctcacagtgtgagcttcctaacagtcctacaatcattccgcttcattctgcccactgcctaccagagccttgaccattccttggggatgcggtgacgtcacctgcactcatgtgaggttcataccagctccctcccgcactgtactgccttggtaaactctctttacttcttagaccccactcttcaggcattcctgctcagagggttttcctgtctgtgtcacttgtcaccaagctccctttcacctctccttgtcatagtctcgtccagcattactgtcctgtttgccatctcaaagcatatggttggttataccatccctagactctaaatacctgtttcctgccttcctgcctctctgaagtttccagagcatcccagaagccatgacaaacagctgccccttccttagtgtcccttagtgcctctgaataacatcagtcacatcgtctagttgggcatgcacttctcactgacatgaaggcctgggtgaccctcatcagttagcatttgtcaagtgctcactgctcgttatttgattacagaggagacaattggaagagagattagatgcaattaaaaataggaaatttccaggaaaatgggtgaatctggaaattattatattaagcaaggcaacccagagtcatatgatggcatgttctctttcatatgcagatcctagcttttaatgtttatatgaatatatgtgagtatgggttctagggtataaaactggaaagaggaccgtgaaaggggaggaagggttatgaaagggggatgagaaccatgaaaggtgttaggtgagaggggaagagaggaatggacagaagaagcaaatgacgtttgaaaatgtcataggaaacctaatactaagtatgctagttttaaaaagctaaacactaccaccaccacacccaaccggatagattaaaggaaggaaaggaaaataccctggtaacaggcaagaaatgtttcttgtattggagtgaacttacactacaggtgtaagagtagggttagacacgggagagcaccagagtagtctagattggtgccgcgctgtccgctgagctataggtggccactgagtacttgaaatgaagctaatcatgggtggaggtggcagatctaggtataaaatgcatatccagctttgaggactagctgtgcatatgatgcatacgtgtcggaatggcagtactttgacttgttaagttgaacatattactgatgctttatctgtgttttttccctttcttaaagcatgactggtggaaacattttaattatgtatgtgacatgcattagagctgttggtcttgaaggattttgtagaaggtcctggggaataagcttgtcagctgtacagagactctgtggttagtctctgtgagcctacaatgagtcatataaccctgctccaggatgtccaaaatgtgtttctcatatagtggctgtggactgtcttcatcttcgaaatccttgcacaaaaacaaacaaaaccctttgatctttacactcatagtgtagattggctttagaagtgacaacctgggaccagattcttacgtggccatctggccatcgtagccctgtttgaagcaaggttcttatggtaaccatatatcccttttggctgtcctccctaaaaatactcctatcaaaataacaatataggcaagaggttagtaagggtgtggaagtcaggacagagaactccacccctctgttgtaaggatgtttacagtgtattgtttagtggatgtgccaagccccattattgtggtcgttaattcagggacactttttgtccttggttgtcctttgtgcctcctcctatagagaaacctactcaatgttgggacctaccaacttgggaccttacaacaacatagagccaactgtttcatatgagggaagtggtctctgttgtctgtgtctacagggggcttcatgcccacctcctcctcacacagagcaacactgcagattctttctgagtcactccaggctgctgtgagggaaacatcggaaaaaagaaaaagaaaatactgtctttagggcctgctgctttttaccatgaaaacacaaaactactttctttcctatgcagtgaggttttgggtggggggagttggggggtgggtatagggaaaaagtcaatctaggtctaagaaaatattaacttagagccaacccaagtctagtgtcttccagactggccattagacttaggagagagtaggcaaggattagcttagctaaccctgctggggtacacgtcttaatgagcagtcatgttgccataggcacagtcacaagagaatgaacagaaattaaacccttagaagctttgtaaatcacaggctagtttgtattaataggtggttttgttcttgctacaccctgttcgcctctctgagccctgtcctgtgcctctctgagccctgtcccatacacgtccttttccttttccaagtgtcacctcacatgaatgacatgaacaggccctgagtgtttcccagagagccctgccttctatggcccccccacatccccgcaaaagctggctcttagatttatcagttacaccttccaccctattttcagggtagagggaatatccagggcccttttgttaccaggaaaactggggttccctctccttaggctcttagtctcattaataaaaacagactcagacagaagctcagagaccattttattaaaattttgaaaggaaaacaatagggcactctagctgtaaattttccgcagctggtgaatggaggtagatggagcaaaacagagaggaaaagccatagcctctgagttaagtaaggtctgcgaaagctggcatgtttgaaagcagagggtggcagacatctgcctgacagaagagttggggttcagggcttcggagaatgggtgagaaagcagaagtccagggaacgcatgcttagacagggaaaacatgcctggacttttgaaaaaggggcacaggaaaagaaaggaaaattatactttttgagtttagaactccaaaagcaggcaagcttagggataaagatgtgcaagcgactgcctcggggaggggctctggggccgtgagtacatcagcatctcattagggggtaattattcctcccatctcctgagtgtgttactagatgcatcagctgtcctggggagtagatgctggccatgagagtgacaagcccagctggattaactcttaaagggaaagacagcatagtgcataatgttctcatctttgggcagcatcagaatgttaggtctccacttggccagagagaggtactccatccttttgactagaaggcctaagcggagaggcagttacaacattttcctttctagggttagcagaacagatgcggtccaaagccaaccatgagaaagaggtctatcctcggtggtctccaaggttactaatctctgcctgctcgacattccatactcgttcattatttattgaaggcgggctgaaatcggggaataaatctgaccacatgcacatccagaggtctgactccaaaactgtccatcaggagagattagggtctacctggaactcctgttatcgtcacacacagctttcagacagggtgctcactgagagcagttaagtgtggagcactcctgctttgtgtgccttgcctcaggacaggaccaaggacattcccctggagggcagactgcatacaaagcctagcatctcacgctttaccactatctttctagtagggtgacatagactcagtgtctttcccaggagtgagcagtagaagtaactagtgagagacttgaggaagtggcggtactgttcaggatgagctatgggaaagcctgggggtgtctgacaagttggggaaacagctatcatgctggatctgaatttagctctcatcgatccaaggactctcctgtgccagactccatgtttcgcagtaccatccagatcaaggaagaaccactatgctaacacagtttgcagttgccagactgatcttggctgttctgaggtgatagtgcccttaagctgaggatacatctcaccttggatgtcagttgtgatcaccagaattccagaataatccagttgtgtgatatatgcatatgaacttcacacacacatacacatatgctacagaagttagcacagcacctgccatgagggtccactctgtgagtggctttgtgtagggctgttagaaccaacctcacatagaaggcctcctgtctttgggcatcacaaagacatgtaacttctgctagcgacaatggtgggaacggggctcagttccctctcctccctcacgtggacattttctctggtacagctgccacatctgcttgaggtccaagacttatccagtctcaaatgtgtcctaatctgaatataaaatagcctggctggcagaaggtcactctacgcctgtgcctttgaaggttagaaaccaccctgtgtgtggctgtagctccctcttggctttcttcatgccaccatctaaacagcacctccctgacctgcctctgagaccacgaggccaggctcatgcaggcaaactgttgtgggccaaaccaaactctgtgaacagaactaaactttactccctaagttgtttctgtcaggtattgtcatagcaatagctctctcacgctctctctctctctctctctctctctctctctctctctctctctcccttttcccctcccccctcttctctctctccctctcctcctcctcctccttctccttgtccttgtccttccccttccccttccccttccccttccccttccccttccccttccccttccccttccccttccccttccccttccccttccccttccccttccccttccccttccccttccccttccccttctgttcttcttcttcttcttcttcttcttcttcttcttcttcttcttcttcttcttcttcttcttcttcttcttcttcttctttttctctctctctctttctctctctctctctctctctctctctctctctctctctctctctctctctgatggccagttttctgtattggtcatttttctgacatggtgaccatatcatctgctggaaacaactcaaggaaggaaatttacttcggacgggtttccatcagggaagagacagggatgattgaggagctgttcatggctggaacaagcttaataagagcccgtcagggacatttcagattcaaagtgtcctgctgatagctccagagttcaggcctgttcgtttctgtgggcttctgaggagacggtgtttttttattttgttttgtttttctgtttaatgcatcagaacataccatgtattaccctgatcaggctaacccacttcccatccagagacatacgctctgagtagattagacatcacctgtatagcttgctcaatgcctgagtgtgtgatgggatgcacactggtaggtgagtgtgtgatgggatgcacactggtaggtgagtgtgttaccatcaactcacttcaataagaatgaccctgacccaggccaggatgatttcacccattctggttagctaaggagacatcccatctttctgcagggcgtggtaggattatgtaggataacaaagttctggaggcacctgggtagtcaggctgttctccacgttttctaacccagatggggaaactgaggttttagttccctcagagctgttatacaatggagctagaacctggcccttccctgctcacacatttccaaccatacagactgcaggcttctctcatttcctttccttcactggtttgatgggaaaagagctacttcagcaacagtcacctcgcctcaatgacagcatgttgggatgtgctatgcttatgcacgaatggagtatggtatgtttatgtacacagggggtgtggtatgtttaagtgaggctgggagaaaggctctcatagtgacaccagccttgctggcttcacatgtcatctgactctggatggtgatggcttctgactacagagctgaccctgagcacgctgctcatgccttggaccattacactgaaggagcaaagggacgagtgctgggctgggcagtaccagctcgtgcgaggtatagaattttggacttgggtttaagtagcaactttgactcatttcttgagagcctggagcctgagatgagttcttccactcatctgttttgtcaccaataaactgaggacagttacagcactgtcctataaatagatccatctgccagaaatagcagttacactggggctgctagggtgggggggaagctgcaatgtctactgcacatattgctacagttcttaaagatgtttccattcatttgtttattcattcattcattcattcattcgttcattcgtttaatgtgtatgtgctctgctgcatgccaaaagagtacaacagttgcccttatagatagtcttcagcccctatgtggttgctgaactcaggacctctggaagagtagccagtgctctttaccactgaaccaactcaccagccctctacaattgtatactctagagacgagcttgcttcacttccatagtcaaaaataatgtgttgaggctgagtttggaaagctacccaaggttctgtggagatcatgctgtctgccgagctgtgtcaatgggccgggcagtgtggacctaggctctcagctgtcagccgcagacccccaaaccctgccgtctcagttgagttctttctttctgcaggggacttatttcacagctcatcctcaggctcacaggacacatgctcacagtatttgtcatctgcagtttgtcatacttctcttgccatgggttgctctcagtgccctccctcacagagcccgggaacactttatttttctccgcttgagtttccagtggctcatggacttcctcccccactctggggatctcggctgcttgtttggaagagtggctttcttgatgccttgagcagccccacagctgcttgtcctgtctcacgtgttccacacagcacatctcaggtgacatccatcaaacctgcagctaactctccatcatgacctggctttcctcctgcgaaaacacagaaaccaaaccaaaaccacagcacttgaaaaatgctaactaatcctcaccatgaatcttggctgcacaaggctaacaaatcccatggccccagttttatgtttggagaaatcagggcagttggcgtcagaagacagaggctgatggaaaggttggagctagccctgtctctgggagttaggctgtttgaccaagggccagatgctacaccaaattcccttctgaacaacaatataactcttctttaactccattgcacttcattgctatagcagaacagctgggtatgttgggtaatggggacagctgtggctaaaggaggtatgaacacttggcttatagttgtggagatttatttaagcatgacgctgacatctgctcaggtctggtgagatccccattggctgtgtcatgggatgggtggcatctagaagtgcatgtgtgagggagtgaccaggtggtgatcctgaaagccagcgagagccaagtatgtctttactgactgacagtcaagaggggtatcaatccccaaaagcgcaacactgaccaaccgtggctgaatggtcttgcactaaagccccaccacctctcaccttcctgagactttcagcatgtgaaccctcgggaacacactcagatcagccagcacagtcattacactcagctgtagtagacaaacctattcacgggcgctggggaagttagcagaaagaactctttggttcctggggatgggaaatattattctgttacttactctgttgtcctggatttatgaacaacatggagtggcctagaagctagccagaggaaataagaacatacaacaagcttaaataaattcaaataatggacaaaggcaactgtggtgagatattatgagctctgtttgacgaatggccagtttccacagcctctgacatcattgctgtagatgcaggtgggcctgctcctaaaggctgcctgctgagagagcagcctgctcttcacctgggtaggctgctggggagaggggatcaccacaggaagtgaaggcaggagcaagcctgctcagggtagagagaaagcctgtaagaagggttgggccagcctcagccagtgggacttaggccagcaggctgtgggagctacctgatggctcttaggcaagatatctatgagagtgggaggattgaaacacagggaagttcgaagttagcagtaaaaaccctattagaacactctccggccaccataaaataaaccttgcaaatatcttagtatggcttttataattttctctttctcttgattttattcattaatagacacatacaataaacacattcttccaggattcagatcagaactttgaagttaatttttaattcaagcctctatgggcattaattttaaaatccttttatagcaattttatgaatggttgcatagggttgtatcatatgaaatgagcctaccacttcaacataataaaaagctttccttccgtggcttgagtcctacatttttttaaggatattttctcacaaaaatatggttatggacaccatgatgatcagcactgattgtcaacttgaaacactgaagagacaagcctcttcccatttctggaagggattatctagaagcgagtgcaggtaggagggctcgccccacccaccatagcatggggagaattggtttatgggctggcatcctgaactgaatgaaaaggagaaagtgagctgagcaagtgtgcgaacacacacacacacacacacacacacattcatcagctgtacgcgtgggacccctgaggtcctcatagccagggagagcaccgaccctctcaggtgatggaaggcactcactcacactgtggtacacgcacttgcacgcatgtgcatgcacacacattaaataataagtagtaaataaatggctttgtgttgtaaatgtaaaattttcattttgtagaattcttcacttcacatttaagcattcatcagtattctagtttgacagaggtttaatcatttatacttggctttttataacagtatttgtactgtttatagatgtttaatcatttactcttggctcttcggtatagagaatgaagtcaaagcagatctgcagatagagaacaacagcagcgactggggcttgccagccagcagtggcagataaacacagtagttttccatcatccctccctgtctgagggccgcctccaagtgcattgattattttttaggtgccttgtgttttattactggtgtcagaccttccttttatgtctgaattttgttagctagctggaggtacacagtgagtttgctttttatttttttattttattttattttattttattttattttattttctagagttaggagttgctaatgttgcaagtcagggcattcctgacctaaccccagccctgctgctgccttttagacatttagcagatacttggttttatctggtcagtatcttgttaagccggttcggtcatttgtgtgcccgggagagaactgtctttgatgatgtagtttgttcccgtcttttcatccttatgactttctctgagtttcgcctttcccttcgtctcattgcatagttagcgttgataatggtgatgtcgtgtacgcttgcctctgtctcagtctcagagagaagatgttcaaactttacaccattacctaggaagtttgttgtttccagacagggtttctctgtgcggtcctgggttcaaatcacagcaccatataaacctgttataatgagacatacctgttacttgagcatgcagaggcaacaggagtgagttcccagcagtgggttccatagtaaagacccactcttaaaaacagcacaacacaacagaatagtaacaacagcaacaacaacaacaacaacaatgacaacaacttttaaaaactaacattttttcaaagtgtagggctgggcatgcagcccagtagagtatttgcctggtatgtgtgaagctctcagcttgatctccagcacagcataagcctggtgtggaggggtacacctgttatcacagtacttaagaggtcgaggcaggaggatcagaagttcagggtctttcctcaactacagcgcaagtttgaggactgcttgtacacagtaagaaagggtcgcaaaaaataataaattcaaagtactaaggcgtaagaaactgctggctctcccctttagtaaccctcagatacagtggtttctcacaggccatccctaatgttgccattgccaccaactgcttagaatggcacctttgtgcctttgctttccacgagtaatacttcaagactggcctattctgctggtttgttcagaggaaattgttaaggctttgttggtccactgcactgtcctggttctctattaacttcggctctttattctttacctccccctaaacgtttccagttacagcaagaacacttagctcaaggtctgctccctgaacagatatgtacacactcaatgccgcattgtgagctctgggcatggcacagcagggcgctaaggtgcccaggacccatttgccctgtgtgactggccacacggcagctacatgtttgccctctgtcagcccacagccaccactattcttgggacaaatgtcttttcaagtctttcacctactttataatgagatggattagttatggtttttttctggtgagttatatgggtccctttttaatttattttgttttattttatgtgcattggtattttgcctatatgcatgtctggagggtgttagattacctggaactggagttatggatagtggtgagctgccatgtacacgctgggaattgaacccaggtcctctagaagagcagcctctactcttaaccactgagccatctctccagctccttatatgggtttctaactctatagtttttgaagttcctttaactgctaactgtttaccacctatatgatttgcaagatgtttttcttattctgtaaatggctgttcccctcttgtgtgtcatttatacacacccacatacacactctgatccccacacacactcgcccatatccgcaaacatgcatatcaccttattttctgtttttgtgcaatgactaaactaaggcagatttacagggattgaagtgacgtccttttttaacaattcagcttccttgtgaagatgttttatggaacctccgttgactggtaggtgactcaccactagggcacaaagaacctgctcgtctggaagcagagctgacttgagcattcagtgccaagcagacaggccatcagccagagtgatgatccacaaatcagtcccctacaggcttaagtgcaggcagacctggctgggaggtgagtgccggaagtattccaccccacccagccacacgcagatacctcaccccagactcagaggcccaccttcctggataacttcatctatctggtaatacttgaagaccaagggcagaataagcaagattgccccacaggtcctgttgctgtcattcatggagaagaccctaatgatgggattgcttccactgcagattgaaatctcctgagcacacagtgaactgtaaagcagttacttcaacacttccaatctgactgaaaacacagcactatagaaacatgtagagatggactgccttgatctgcagttggtgcccctgaactaggtgaggtcaggcagcccctttgccactcatgctttggcctctctgcagcccgtctccttcccaggaggcagcacctttgatgggctgaaatgcttcctacggtgctgggcgaagaccgagactaagctgccttttgacttacacaagagaagagactacacaacagaaagttttcatatgtttcaacccaaccatttcggataaagatgatcccaagaccagctgctcaaggagtggttaggtataagatatgtgcattgcatatctgtatagaagaggtttcataccagccaaaagaagctacaaacaaggtcttaaactcatctcttttccacctctgtaccaaatgtccccactgcctgactaccaaaacatactccaccatgagcccagggccacatactgttcaagacctttgcccattttttttttaaaccacaggctgatttcttgctatggaggtgcagaaattttgtgaactttggagagtaacttcatctcagattcttgattgacaaatatctgtaacattttcaatgttttatatccaacttgtatttgtgtaaacacaaagctccaggcccaggactatgttgccgagcagcagagggtgtggaaagtgcagaagagccaggaaggtcttggagaactgagccagtagagcatgggcgcaggttccagagcattgcaggagcttaggcccagagcctgccgtgtccccttcagactgaagccttgctgcaggggtgcctgtccaaggagaaatggtagaagtgaaagaataccagggctgctcacatttctggaaaagccctggaaacttatttccaccatgtaggcccagccttacactcttgcctgaggccctagagccacagaagagatagaagaaggctttgagttgccgagggacggaagctcactgtgtggtaggttctggttctagccagagtgtaggagagacgacagccctgtcaggtgcctggcaggcagctgaccctgcacctcagacttcaggaccttctccctggtttgtatttacacagatacaagttggatataaaacattgaaaatgctgcagatatttgtcaatcaagaatctggggtgaagttactctccaaaactcacaagaacacctgcacctccataacaagaaatcagtctgtggtgtaaaaaaaaaaaaaaaaaatgggcaaaggtcttgaacagattttcctccttgaaagtatacatacaaatggccacagaaagaacatggccacttggcatctctaatcctgaaagaaatgcaaaccagaaccacaatgagccatcgcctctcctctgtaggatagctactagctaaagggtattaatgtattttataattcaatcatcagcatttttattatcattttaaatattttttacttcatgtcagatctgtgagttcttttaaaatgtgttttcaaacttgcaaatgaaaccaagtgtggtgacacatgcctgtttttctagcaggaagctgatgctgtgttgttaagagtttgaggttggactggggtgcacaagtgcctagccagccaggcatgcgtaggaagacacaacagagttgatactgtctgcctctgctcctctgtcgtgaataatttttgcttatgctgttcctctacctctaaattacatgttcattttctttcagtgaggagtgttttcatattttggcatgcttttgtatgcttcatggtattatctaatcagtgagtatagttgaatagtttttactttaaaatagtgtggataccttatctctgtaaacttgacagccttaccagtcagctttttttgtgacagagggcttgccataaacaacttgaagagagaaagagatcttagctcacaaaggcttcatcgcatggtcctctgtgcactcccacagacttttaaaccatgtgtcctgaggacagacattatcatctctcatactcacatatatacccaagcatctagacacaacgaatagctgttgtagacattaaaaatgagagggagggagaaagagaggggaggggaggtgtgtatggggggaagagccagaaatatacacgtgaaaagtatgacttataaagtacttgattgaaagagctaacaattctggtcaagtgagacacaagaaagcttaggtaggactttattgattatacatttacttgagatgaacacttatccaaacttagaatgatttaaataggcgattaaaactactcagactacttaaattcaagtcaagtctttgggtttatattttataaaaacttccaaaaataactcagtacttatcaaacctggcctcatactcaaaagaaaaatgaataataaaggagggaagccagcttgagccccaccttcctttatgatcttctgactgaataaagatttacttataatacaaatatattttcattttcagaaattgaggactacatttgagttgcttcttggacaagttagaatatatactgacttatgtgaataactatgttttaaaatgttagagatggaaaatgaagctagattcttccctttatctaatgtcagctgtatcttcaaatttatgaggtaatttttccacatatctccacaaataataaagagcagcatttgccctgcatttgagctcaaataaatgtacattcttttgaaatgaaaatattgacaatgagcacaaaattagaaaagaaagaaaagcaatgcatataaatcacgagactcttgggagggagtttaagcaaatctaagaactgcacttttcatgattgtacattttctctttaaaacaaatcactttcccaactctgcgtggcttgacaggtccaaggatgacatcagctctttcactatgcactatctgctttccttcagataactcaatggcacttcatcaagttttaatgattgagatgaattagaaaccaatgggggttgagtttaaattcccttaactgccatgcatcatgtattcctggccttagacctacttttgaacacccctgagaatttatattgcccatggttttctctggttctagaaatagaagtgaacaagtgaaggaacatacactccttaaagttctaatagtgtctgtcaaaatgtactaaattacatcactgtgcttcaggaatccatgccaatcatcttcttcccagtctctcttagcccaataagtataataaacttggcactgttgtttcatttcaggaaaatcacatatgttatctgtggtgtagtgtctttcattagtggacagatactgactcagtaaggtgacagtacaaagatcatataagaaattaggctgttattcaaaaagaaaagagcaagctgtgaactgcactaactactcttgcagcatctaagaacttgcctgtgactgtcaggcagtaattcctgtattctagacatctggtctaccactcagctcttctaccaatactgctcacttttgaatgtacatccaaatgtcctgcttttgttgattaacattagatcaaaattcagcatttctttttcttttcattaaagattgtgcatatggtggggggggggggtagagtatgtatgagtctaaggaggtcagagacaccatttgaatatattaatgtacatattctatttaagacataacctggatgagtctctggctcagtagtagagcatttgcctaacatgtacaggacccctaaattcaacccctgataccacctacaagaccttaaatctcataactgacttttgaagggtttataaatccttcccccaaattcttgtttaagttgactctatagcaatgtacattgtctttctggttatccaaatgccagaatgttttttcaatactagtgtactttggagtgtctggcaaaaacacaactcaggccagtcagcagaatgattttgaagtttgacttagatgcatagttctttgtcctgttttcctgatgtctatgctggctagttttatatcagcttgacacacagcagagttatctgaaaagagggaacctcaattgagaggatacctccacaagatctgcctgtaaggcattttctttattagtgatagatggggaagggtccacttcattgtgggtattgccatccctgggcatgtgatcctgggttctataagaaagtaggctgaataagccaggaggaacaagccagtaaacagccctatggcctctgcagcagctcctgccttcaggtttctgccctgtttgagttcctgtcctgacttccttcaatgatgaacaacaataggaaaatataaaacaaacacatcctttcctccccaacttgctttttgctcatggtgttttatcacagcagtagaaaccctaagttaatgtcctatggtgccaacattcaaaaagaaaacttaggctcttgggaaatgtcagtgagctgagtatctacctggaagaggttcccaaattgatagtaagggggttgtaggcttcttcccagagtctccctgggactgctttggcagtgggtctgacttcttcacagaaactcctctgatcttatagaagtgctgaggttgggtgcagacaaactcttatggactcccagaaagattgcatagaaaaagcaagtgctgcctctgtgtgcccaagagactgcccccagcttttgcctctataaaaggcatggcaggtcattctgtgcaacctttgcctgttgatctgtcattgtatctcagaagacaaagagcatcctcacccagctccatcgtaagagctcatcctgtctctgggaccagcgagcctgtctctgtatctcctgaaaaaataaaggcaacttcctgggatataagaagcaggtctcatcatttaaccacagtcagagggaaactgggagaattgattgttcctgtgttttttactcagagtgtttaaagattagtggcaaacattctggtccaataaaaagtaaaagtgttttctatttggcgtcagtttataaaaaataatagaggaatcaaatggaattagaatatacagaagtatataatggtctctgagtgtgagggaggtgtgaagacagttttcattatccttttgacctaattcactggatgtattttatttacaattaaacattagaaagaaagaacaaaggagaaaggaaacaaagcaatactgtgctcaggttggacaccactcctctcctctcccctcccctcctctcctctcccctcccctcccctcccctcccctctcctcccctcccctccccttcccttcccttccctcccctcccctcccctctcctctcctcccctcccccacccccataagtgtgggaactctgctcagagccttggggctggagttaatcgtttgatttctctacatagtatagatctgtaaactgcctcagtgacagtaataaattagagtgtcttgataaagaccaaactcatcaatttttccaaaatctgtatttgattaattctacaaaggtctaggtcaaagttattcctcaaagcttatcattttaacaaagaaacccaaggtttccaggtttgtcagaaaactcattatcgctgcacgatggcaaaaggtcacaaaatgcctccttccacaagacaaatttcttctgctcaacaacccattcccctagcagaaccaagaaaaacctctgacatttcagatccttttgcttcagggaaaataaatgttccccagatcgtggaggaaaatgacaaacaaattaatgaaaaacagatccgttcctacagtgtacccggctagggcagaccgcatacactcaaagtcaagcgctcactctcaggtcctgccacctctgcagagtgacagttcccacagtggcatcagcgctgtcctcacagaaagctgtacacataccacagcgctgcaaaatgaaagaaacatgcgtcagaaaaactccagtgtttaactgtggctggaactgtgaacttgtgagtacgggcattttgaaagtgactcagccccttctcacagtgcacacgcagaacttgacttaatttagcagtgctgttttcctacaccctaaaagttcctgcttttaattctgcatcatttgtacctctgaacacatgctttccccatatcttcagtttccactgattaactaattttaaccttgaggacatttcttccttccttttttcttccttccttccttccttccttccttccttccttcctttttttcttttgaaccaagcagtatggacaaagcccgagttccccatgaccccagctgggtgccagtgctaacgggtttaatttgccctttcagaatccttcagttactcatttaaacaatataggcatgtggaattgtatacatgtgtgctgcttttcccccatatacttggtttcatatgaaatgttttgctttgtttttgtttgccatatgccttagttcagtaagtagagattagtgactttctatgggggctgctttgcctctgggggagacttggtgacttctagaaagctttttggtagttacaaatgggtagagaccaaggatactgacaatcacaatgtatacatcagctccctaacagagcatcatctacatgaagtgtcaaggatgccaagaccgccgctgttaggatcttcctcctctgacctgcagcagagccagtggtccattcagccagtcatgcacaggatcatttggctgaatccttaagcatgtgggcctattccttttcaccacagctagccctcttcctgcatacctgtcttaatccattcctgctgctataacaaaataccacgggtcaaacacctcataaatatcagacatttattgttcacagttgtggaggccaagaagcccaaggtcaaggtatctgcagatgtagtgtctataatgggcttaatctccaagtcaaaaatggtttcccttggctgtgatgtcttaaggcaaatggggtcagaagggcaaaggtgaaaaagggaagtatctctcttcctcaggtctttttgtgagggcactaactaagcctgtccatcctattcatggtggaggaactaaatcattccaccttgtgaccctacctctcagtaccttgggggtcaagtttcaggaggccattccttttaaccacagcaacccctacaggctaccaagatctctgaatgtcctggctccatctcagaagccaccttgtacatttcccaaagctagtcaccagggtttccttcagcactcatcccccacttggccttgcccctgactgtccctccctcctctgtggtaccaggctgattcccagaatcatgctagactctgttactatggagattaactatggatgggtcctgctctgcagactatctggtctagcatcagggattgtgccaggattgcaaactgactgactgactgactgactgactgactgactgactgactgagatatagtattacagattgtagaggccagcaagggatgctttttcttcatggttcagaatttattacacattttatcttggtgactatttctcctgaaacacacgtttcaaacagtaaatcaacaagaaagctcctttctctccacttacagcccctgtattgtgtcacacacacactctctctactgagaacacacttggcctctgccaaggctgagagcttcctttgagagcagtccagcttgtgagcagctgaggggagggacaggtggtccttctacagctacaggtccttcccctgccctgactttcagcctcctttggatggtggtgccttgggctcctgtggcctctcactccttcaaggggactccaggagtagactgagataaaggtgctggctggccctcatctccctggatcaaggaaccttaagcatctaccaaaaatccaacagcaaaggaaatctcagctgcaaatccaatccaataaaccccttcagcttgcacttagtgttcactgtgcagggttgcgggagatagaaagataaatgggatgtcatccccaagaagccggagcccaccaggatgggggcatgtataaacagttacatagaatgcaaagcagaatgaagttaccactaaaaaaaaggcttgagcagagtagctgggggaggagggggcttagttataaagcagggacccagcagcacgcctgaaagccacttcccacctaaaaacaagaggcactttatgtggtagattgtcttcagtttaaacaacaggaaagtaggatttctgacaggagaaatgaaacaggaacacatctaggttctcgagagtcattctgcaaagcttcgtcacacggttggctagcctgggtagaaatgggagccaaccatctgagttcccgtcacacacatgggagagccacctcagatcttaggaaggcatctagctcagtctccactgctgaggccaagcagcccgtgctgtctagcaaagatgtattgattcatttctagtgtgtgtatagacacggaccttgatcacgtcaggtctaactgcaaagctcttcaagttctctgtctagacctgtctacgtttatccctctaatgcccatggggtcctggggccagaaagcttgtagctcagcacagaggccgttactggagaggaccaaggcttccttggatgaggaagcagatgggagggaggcgtggatacagacaggaaacgggtgcatgaagtaggtgggtgaataaatacaccagtcacaagctttctttcctcattcacgtttgctcaattaatgacctcacacacacacttttttttttctgtgttagaggcaaaacctagagcccttcacatattagggagacttgacctctgaataccaccaccacacacacataaccacacacacataaccacacacacacacacacacagagccagataattatatttcatccctctaggtagaattctagttgactgaacaagagtctggaaggcaggtaggatgtagttttagatgttccagagggtccctgcactcatgtcatatgtctatgtagcatatttccaggaattcatcttacaatgaagcccactacccatcccatggtctctagggcaacaggctgggcaagcccagggtctcccctgactaacaacaagctgctgatcagactgggctcatgtgaaagttctgcttctgaagctatataggtcactgacaaaaggcagtggctgaggccgtaggactgaagccctactctctactcggggacagtcaagaccttgcttcctgtcctctctggctccaacctccgcatcagaaaaccttcctgctatggaatctcatgtgtacaagctttcttacctccttgactcctgtcagccagagaaaactgtcctcagagactcctgggattagggtagacccttcaggtgatctccctactaagctcatggactagtcactgtattgtagaacacactttgcccctgacataatgcatcagtacagcaacactagaggccaatgccatgggaactatcttggaatctggctacccactgtcctggatgtgactctgtctgaccttgaaatgataccaggagattgaaagccagagagctgagactgcagatgggatgggagagatacaggagatgcctctgggaaccagagaaaagcttttgctggctgaatcagattactgagctaggaaagaaaagcttttcactagtgagcattccggttgagtagaatatcgaagcagcagggtccttgcctctttagctgttcctagatgccaaggcatcttgactggaaatgctatcctgacacagttttgacctgagaaatgtacatctctctaggaaataactctacatgaggcccaagtgcctgaagcagagaccgcagttagaaagaaggactcagaggctgtgtgactcagatctcagctccaagccacctgagaagttctccagagataatagctcctcaaatgtttcactttttcaggacacagactcctttctccatttccccaggtgtctttttgcttgtattcacaacatggtgtcacgggcttgtattgtgagcattcagtgaagttgtagaccttccttatcgaccctattgtcaggtctggacctgccaaggggctgaaatcagataaaaacttcaagagctgtctttggggaaatgtgtggggaggggaatcagttcgtgcagatgctttcctccgccttttccacaggctaccccaggctgctaactgttggacactgcctgccctccacctcacaggtgcagaaagcaggggtctgcttctgttttaaactacactgaaaacgggtgtgcttgctcttcccgatctggtcttcaccatgaggagaatagaaaagaatctcctaaacaaaaagcagggatggagtgcagtgaggggggggggaggaaagagggagggacggagggatggagggatggagggatggagggacgggaggtgcctaggcagggtgttagggctcagtttagctaaaaagcacttcctaatgtacaaatccaccactcaaaaaggaggaagagaaagattgggggacacagtttacctttccagcagccatgagactagaaaaaaattctttttaaaatatcactttaaaactgaatcacactaactctttttttttaattgggtattttatttgtttacatttcaaatgttatccccttttgcagttttcccctgcacaccccctatctcatctccccttaccctgcttctatgaggtgctccctcacccacccacccactcctgcctcacctgccctagcattcctctatactggaacatcaagccttcacaggaccaagggttcccccttctattgatgccagataaggccccttcagctccttcagtcctcaccctaactcttccatagggtccctgtgctcagtacaatggttagctgcaagcatccacatctgtaatggtcaggatctagtagagcctctcaggagacagctggatcagactcctgtctgcaagcacttcttggcatcagcaatagtgtctgtatgtggaatggatccccaagtgggacaatttttggatggcctttccttcagtctctgttccacattttgtccctgtatttcctttagacaggaacaattctgggttaaaactttggagatgggtggcccccatccctcaactgtagagccatgcctaacctctggatatggtctctataggttctccctcctctttgtggggtatttcagctaatggggtcctaggaggctcttgctttcctggcatctgggactttctgattgctacccccagttccccatcccccattgctatacacttctgttcaatttcctgaccctctgttcatctcctccatctcctcccatacctaattctgcccctctttttcctttccccttcctttcttcctcgaaagtgcttcccaccctctacttcccttgattttattgttccctcttctaagtaggactgaagcagctactttttggtcttccttcctcttgagcttcatgtggtctgtgagttgtatcatgggtattccatagtctttgcctactatccacttattagtgaatgcataccatgtgtgttcttttgtgactgagttacctcattcaggatgatattttctagatccatccatttgtctgagaatttcgtgaagtcattgtttttaatagctgaggaatactccattttgtaaatgtaccatattttctgtattcttttctctgttgaggcacatctgagttgcttccagcttctggctattataaatatggctgctatgaacatagtggaacatgtgtccttgttatatgttggagtatcttctaggtatatgccttgttatatgttggagtggtatagctgggtcctcagaaagtactatgtccagttttctgaggaaccgccagactgatttccagaatggttgtaccagcttgcaatcccaccagcaatggaggagtgttcctctttctccacatcctcaccagcatctgctctcacctgaatttctgatctcagccattctaactggtgtgaggtggaatctcagggtcattttgatttgcatttccctgatgactaaggatgttaaacatttctttaggtgcttctcgggcatttgatattcttcagttgagaattctctgcttagctctgttccccattttttttgatagggttacttggttctctggagtatctagtctgttagtctatgtctttttattggggagtttggagtttagtccattgatgttaacagatattaaggaatagtgattgttgcttcctgctattttttttgttagaggtggaattatgtttgtgtggcaatccttcttttggatttgttgaaagattaccttcttgctttttctagggtgtagtttccttctttgtatttgagttttccatctattatcctttgtagggctgaatttgtggagagattgtgtaaatttgtttttgtcatagaatatcttggtttctccatctatggtaattgaaaattttgctgggtatagtagctggactggcatttgtgttctcttagggtctctatgacttctgcccaggatcttctagctttcatagtctctagcgagaagtctggtgtaactctgataggtctgcttttatatgttacttgacctttttcccttaatgctttttaaattctttctttgttttgtgcatttgatgttttgattattatggaatgggaggaatttcttttctggtccagtctatttggagtcctgtaggcttcttgtatgtttatgggcatctctttctttaggttggggaagttttcttctataattttgttgaagttatttactggccctttaagctgagaatcttcactctcttctatacctattatccttaggttttggtcttctcattgtgtcctgggtttcctggatgttttgggttaggagctttttgcattttctttgattgttgtgtcaatgttttctatggtatcttctgcccctgagattctctcttctatctcttgtattctgttggtgatgctcatgtctatgactcctgatctctttcctaggttttctacttccagggttgtctccctttgtgatttctttattgtttttatttctatttttagatcctggatggttttgttcaactccttcacctgtttggttgtgttttcctgtaattctttaagggatttttgtgtttcctctttaagggcttctgtttacctgtgttctgtatttttttaagggagttatttatgtccttaaagtcctctatcatcatcatgaaatgtgatttcacatcagagtcttgcttttctgttgtgttgtgttgtgtgaaatattaaaaagaatggcagttcccaagcttcactcagcccctgaggtcttgacgaccagttcttaactcagggagactctctgactcagagctccaaaatctctccacccagcttgctcagttcccactgctgggtcactacagcatcagccccatgcttcaaaacccccaaggcctttgtggtgcacttcttacaaactcaccctttgccgctgtaccttcctctcttgaacccagtcaaaccactacgtgaaggaaaacaccacataaagttagttcagaaacaatggtaactcaatcactgggcgcaaagacttgaatcctaatcttgttagccatattaaatctaaaccctttggtagtaaatcctggcagatgcgccatataagccaggagacactagtagctacattttgccctctcgctatccccatccaaaaagccttcctgctttctctcttcctctgttcaacccagaagtgccacctacttgcccagtgattggttcctttattcattaggggaaggttcacaagaagtctctccagcgacagcagaattaacatcaaaatacagccatcaccagggccatccacaacagtgttgtgatatctagagctcgctgtggtggtagaactggattcttacgatgccaagtagccttggtttctgttgcttatattctcgcacttacctctcgacatctagctatctatggtgttagctggtctttgctgtctctgactgtggcttgtctctcctgtaagcctgtgtctcagcactcctgggagactagctctctctgggcagaatttgagagctgtggcacagggtcagctccaggcgcagatggaaactggaaggatcctgtcccaggttgctcctcggttcctgtgtcctgagggctcagggcagttcccttttgggcgaggtatttgagcagaagtggtggtcccatctgtactctcaggtatgtcagcactcctgtgggagaccagctctctcctggctggatatgggtatggagagctgtagcacagggtcaggtcaggggtgcagatggaaaaactcaccctaactcttaattttgtacattattttctttcattgattgatgaattttattattgttttgcttgagtttggggttttggggggttgttttttgttgttttgttttcttgtttttatgcctttttatatttaacaaatacttgttgcctccttgtgtctatgatactgtggtcctggaataccacataccatggtactcattctttaccatatataaaaattcccacagcaacatgtttaaaatccagcttccttagagcctccctataaatagctcaggatccctgagtgtgtagatctcacacacacacacacacacacacacacacacacacacaccactctgaagtgtagatgactcaggggtcttccctttgaggaaggttgtcataaaaagagtctaagccatagtttcttgtccaaagaacacatcactgctgcatcaggggctagacagtcaacatgtgtaagatgagttattaacatccatgatggatgccaaagagccaagcaataagcagagaaaccaaatgtgagaggaaagaaattgagggtcctcagaagattaaaacaaagggttccaactgagcctttaagaacgaaggaaagggtgagtgagggaggagttgggggacaagtggaggagcatgatcaaagtacattattttaaaagaacatagagcgggcattgagtgaggatgtatgcacagaggcaggtggccttgtgtggtcaagacagctcaacacagctcaggcagatggagtcagatggcttcactactgtgatgagctctgaactacaacctcattcttctttcttattaggttgctttccaagatatttcataaagtattgcacatggacatgtgaaaaaaaagattattcacctttgaaatacttggagtgcagtatgtgttctttgagcctgatttgtttaagtgtctgctttattgggaaattctggagacgccaatagcgtctgattataaagttcagacgcaaaggctttcattaaaagcatgctcccttgccttgcatattttccttcagaagtggcagccttgacagtgaagacttcactacaaatcagtgagcccaaggaaaatagtctcaaaatgtggggacagtttgtcagcctctgtgtgtggtgcccctgtctgttcacacactctgtcattacagctcattcttgttctttttttcaattgggtatttatttcttttacatttccaatgctatcccaaaagtcccccacacgctcccccacccactcccccacccacccactcccacttcttggccctggcgttcccctgtactgaggcagataaagtttgcacggccaatgggcctctctttccactgatggccaactaggccatcttctgattcatatgcagctagagacacagctcattcttcttacaggcatcatttaatcgtcgttattaaagagtgcttgatggctacaccacctctgctcagaactggttctttctcaccccaacattttgaaaattggaataaaattcctgaaaatattttttgtcttattaaaatggtaagaaattgagagacccctttcttgatagtattcataataaagacaaagaagtagaaagctataatgccacaggattctgttatttagagataaatcactgctgtggggttttatttggtgagttctgtgtggcttcaggaaaagaaagtccagagtttaatttgcattgtgtagaaaagctgttagtgaaaatatctgtacttattctgcctgtgcatagtcagtctataaactttttatcatcagcgattatactcatgtgtgcccagacaatttaagcattaaactctcccacttgtattttatgcatttaatggtgcatgtttgagtgtgtgtgtgtgtgtgagagagagagagagagagagagagagagagagagagagctgtctctgtgactttctgtaatttgaccagcatttgaggtgaattgaattatctgagcttgtatttcttctaagcccctcttcattgctgagtggctgttcctgatctattacatgcatttatttcacacacagatagctctgaaatcttcctcaacctggattcatatggtcactcactgaagattccattcgctctccctcctgtctgcctcactgtaaaaattcttcttctggcagatgctggggcctgcctttcttcctgtgagccagtgtacattgtcctgcattctcaggtccttgcagactctcaagcacctgcctattgttgcataaactctgacccacacttcagttgagattgcctgtgtgtgtgtgtgtgtgtgtgtgtgtgtgtgtgtgtgtatatatatatatatatatatatatatatatatatatgctcctgtttccatggtgacctgcctatggatcacatgtgtaggtgtccgtggcatggtctttcctcataagcatacaccaggatgtgactctttatacttgcttgaacagtcaaatggatgtgaatatacatctttgacagagcatgtggcaaaaacttggaatagtgaacccagtctggggtcagtcatttggcagagaggctctgacaccatggatgggtaatgggttttgatctgcactaatattttgcctttttccaatattaagtttctgctttcaatgtttttagggataaaatgtggtcagaattctgtgctcattgcttcatagaatatatagttcctgaggtcctctgtaattctgatgttgatacacccctaggagaattggcatgtcccattcgcacatctggtttgctttaggcaagggaactttctcgtgccagaatggcttttggtggatataggaaatctgctttatgttgagcctctgcaactcacagatgcaaatgtttaaaaacacggccatttcttcatctgaaacgtccccagtcactactttcgtccaaaaaaaaaaagaaaagaaagaaagaaaagaaaagaaaacccacaaaagaaacccaaaacccttacagtgttataaattcattgtacacaatccatatccactcatctcatggctcatatcagagcggacttaactgtttggtggcatcctagggtgcatgcccatgtcctggtctgctctgctaggttatgtcctcttggtggaatgtattattattctcctccatggggaaggacctcagacacatcgccatctgcttgggaagatgatgcagccccgttaaccctgaggtggtgctatgtggtggatgatatgtggtgacaggcctcttgccctccacctgcctccaaaagcaagaagcccctccaaactgctgtgcctgcagcgtcaacctttttttttctccaaatttgaaatttaacctaatgctttaggtcctgtattttctatgagaaacctaacttttcctgtattgctaattgttatattggattattttaaaagaaaacagaaaaaaattttatgtaggaaaaagtttaactatgttaacagcactaggtcaaagattcaagacctttgagagcttggaagaaggaatcacccccagtcatgttgtaatacaactgaacacagggctttgtggctgaagtagctaccccttcacccccaacccccacattcaactcacatattccctggtggctctaactgtttgcaaaaggaaggccttgcattatagtctcttaaaatgcatacaaaataaaaacttaaaagccattcggtgagaattagaggttcatggctgaaggtacagccttgaacgagaactgggtagttctctcgtgtccccagaaaatgagctcacatggcaaaaacagacaaagtctaccccctgccaaactccatgtcagcagaaatctggtctgctttcccaaatggaatgtggatttccaaactcgagacgatctctttccaaagcaaatgagaaacaaatacgtcctgggcactggctctgctttccatccagggcacagatttcccactgggttgttcctgtctgccatttcccaaccagcacgtggtcctgggacttaatagagtcaaaaagcccgtgctggatgtagataaaatctctctcactctgacttgccttactgctctgattcacagcacagcagcctcagtgtctgtcccgtgaaaacaaatgaccaaggttttgtggaaaagactagatctgggtcctgctgacatagtcagtgcaccagcctctgcccacaccaacagcctctgagtcctgtctgttgccagcagtcctaaggccagccaagatgggggggtgggggggggagagaacatgtaacctgagaagtgtatcagtgggtagtggggccgtggcaggcctgcaggcaagggaagtcctgtcccccctggacttatagctgggacactgatcactgcaggacctggagtgagatggcaagtatggacaggtgtcccaagtcacacagttgaggctccattctagtgttaggccaggccctgactctagcaacctcaggcaacctcagcatgacaggtacctttccgagctccccgtgaaaggtgggaactagttaaaaggcagccacctcatgcctccacctctgaccaggcctggcctttcccccatgtttgtcacgatgcctatggaaaacccttcagtgagcccttgatgctgatccaaggcaaagcgaacaccaggccatactgcagagcctctgcacaggctgggttctgcttagcactgtccccttgccctccctgagccatgcacccttggtttcagctagccttcatgctgatctttggcccctactgtatttttctgcatctctgtgtggtaaaactgtggtaaaagcccatttcagatgggctctccatgttgggccttcctgcccatcaccactctacctttcttggtagaattaaatactgattttacctcagcatttttgatgcatttagctcatcactatagggttatttgtccccagagacctggaggcctgttcatacctcttggtgtttctcacagcccactcctgggcacgtagcttatccgtcacaagcatctgtttttacagttcataccaagatggaagcctttgattcattatcattttggctctgattaattgaggaaataaaagcagggcctgtgggacatccagttgacatttattggtaacttctccacccattacaggcccagcaaaaaaagtcatcctagttccttgaagcatagcatagaggcccattctgaggcaggaagatccactgtactgagagctcacaatgaaattgatcccctggggccttcaaaagtatttggcttttggaagcgcctgtggctccagaggtcagtgggctgctttgatggaagttccctgttccagaggtataaatgcaatgcagattggatctcactccacccagtacaggatgcccctgccagcacactgggccctgcctaagacttgcctcctcatgaggtcacagacttcatcagaaaagtgcccgggggcctggggagatggctcagtctatatttgcccatgtaaacgtgaggacttgggcccaaatctctagcactcacgtaaaagttaggtcttacaggatggtctatggtccctgagctgataaagtggaaatgcgtagatccctggagctcactggctagcctattcagctaaagaggtgaactgcaggtacagtgagagactgggataaaaccaaaactataactgaagtcaattaaaacaacggcaacaagaccaacaatattgacctctgcctatgtacatacacacatttatctcttctctctctctctctctctctctctctctctctctctctctctctctgtcatacacacacacacacacacagatagaaatttgtgaagagtcagactttcaaacaccaactgaatgtgtaagagctaccagagacatgtctactcatctttgcatattaactcaattttaatgtgacaatcatactggattataagtgtgcttgttttaaaattctttgtcttttagacacgtgctgaaacagttacagaggaaatgatgtttgacagtgggtttgaaataatatagaaaggagagactgagaagtcaagaggaaacatagccacaggctggtgattgctagagctgagtttgggataatacttagtttttcatgatgtctgatatttttcataacaaggtgattttagcagaaaggctactttgttcctgggctctcctgtctgagattttctcttactgtgtctctttgctttgtccaagtttgctcatgaggacccttagtaggagaggccaaattactggcttccattgaaagaactttccttaagttctgtcaaataggtttgaaagtctttgaaatttggttccttcctccttcacatgggggtaaaggacagtacggagatctagacagaagactagaactctgaactgtgggctgaaatgtcccctttgagcgatggcttttaacctgtgggtcatgacccctttgggggaagctgaacagcctcttgtcacagtggtcacctaagaccatcagaaagcacagatatttacattatgattcataaaagcagaagattaccattatgaagtagcaacaaaaataattttatggttggagggtcaccacaacatgaggaattgaattaaagggttgcaacgttaagaaggctgagaatcacaacctttgaggttcatcccttgcctttctcctgtgaagagtagctgtcccctggctacagctggtagagaagtggaccatttaccatgcacctgggtcccaggggaactggcaaaggagcatttgcaaagaaaggacacttcagtagaactgaagctagttagaaacccacctgtgaagatgggctttctgatagagccagagacctctggccagccaggaccatgaaccaaggcaggctctgtgctgaattatttaacctcccaaatgtttccattgtgtctcctcctagaccagaggctctctagtccattagcatagcattttccaagagtggggtttcaccagccctctccttaaccaccagcataccccagcatgatacagatgggtgctctctgcttccccactgtcttcggccaccctcacctccctggccctgcacacaatatctgtggttatgagagagcagagagactatggaagcatcagcctggtgacagtgtaccctctggacacgagttggatggtggagttctcagctgtctctacctatgtcagctagccatctttgctgacttcctggataggctgctgtgactaccaagctgtagtcgtcacattccaaatgtcaccaggcagttaggatccaggaaagacagacgactgagagttcccaggcaagaccaggaggttgggatgtaccacagcaagtggcaggtagaagataaagaatagggtaagaagaatggctgactgggaacttagaagtaggcttgagtataacatggctacagggttttgaaatctggatgcataaaaagagactaaatgtgtcactactgtatccggcccaggaaaggaacctaatccagacactgtgtcctatgcctgggaagtttctgaggactccattccaggctgtgttagctgttggtgtgagcatgaggttcagtgtggtggctcataccataaccccaacccttgagaagccaaagtagaggggtcactataagattgatgccagcctgggctatgccctgagtcggatgttagcctcttctgctattaagcaaaattctgactaaaatcaccaaagaacaaaaactcacaaaatcaaagcaggcataagactgggatgtccatcaagggaccctggctcttgtcatttcgtattccctctagactgcttaatactgctaaaacaacagggcacgatggtaagacgagaatagcccagaggaaatatttttgacaataatggtgaagctcatctttcctctctgtcttatgtcagccatttgcttccttgataactattagcccattcagttctcacagcaccccctggaagtaggtgtcggcattcccagttttcagagaggaaagagagccataggcagggtaagttgtttatgttcccaggcaacccagctagaaagtagcaggatcacagctctgagtccaagctcacagagtcctctgtggtgttactgaccgtcagggttaaaggactggagaaatggctcagtatggaagagcagagggcccaagtggaaggccctgcactttgtgatggttcattctaggccttctcctgaccactgtgtgtagtagtcacgcacatggtgttcatacatacatacatacatacatacatacatacatgcaggcagaatactcacacacataaaatgttaaaatctaaaacaaaacaacaacagtaacaactggtttcttggggtgttctattcctgaggtgattctgcaacctctgtccaggtactgtctcaggcctgccgagccagccagctcctggagactcggcctgtgatttttaatctgtggccatcccagctcatcaaggcaatccccctatcagacgacagacatgctgaccatgagtgtatccccacatcgtcttcccttgttctgacttctcctcgtcagccagagagaacagaaaaaacccagctctgacaggaatgaactttgctctctctctctctctctctctctctctctctctctctcagcagcagctcctactgccatgggatgggggtggggtgcatgcatgcttttccttgagaggcagaagatgggagggagggaaagaactagaaatcagagaaacctagagcagcagagatggtcttcctgccagcctcgctgtgtcctcttcctgacaacctctctgtgttctctacctgtgcttgctcaacctttatcacaggcccgctgtcaaatcacaacgcagaggccggacagcaactcgagctgcctgtgggccttactggcgggatgattctcccacagagaagtggtgaacaggaaagtaaattagtatcagataaacctgatgcgattatcggattaggccgctgcttgttatgccggtcagcaaatgtgagagaaggctctggtgtttccaaaagcctcatggagatgtgctttctaaagctataccattgtcccaaggctctgcccagcacattctctctctctctctctctttctctctctttctctctctctcatgtaaaacatcttattgttctttaaaacggttcagggtttggttttaagtcagtccgcacatctttcatcagtctctctcacatgtcaactggcttcagccaccaatacgttatcaaattcattaagtccaaaagaaaaaaaaagctttaattttgagggtggggggtggggaatgtccagttctgagaacaattaacattagtcttctttaaaacaaaatgggggccatttcatgtcgctttatccacccctcttcccacacagaacagggatgtaactctctctggcaggcactgatacagatggacacctgcaggtgcataccctcacaggagcacacaatgtgcattcttttgaggaaacctatgaagaactccatgcctttaagaagcactgggtaacaggtatccatcccataatcagccaccaaacgcagacactattgcatatgccagcaagattttgctgaaaggaccctgatatagctgtctcctgtgaggctatgcagtgcctggcaaatacagaagtggatgctcacagtcacctattggatggatcacagggcccccaatggaggagctagagaaagtacccaaggagctaaagggttctgcaaccctataggtggaacaacaatatgaactaaccagtacccccagagctcatgtctctagctgcatatgtaacagaagatggcctagtcggccatcattgggaagagaggcaccttggtcttgcaaactttatatgccccagtacaggggaacgtcagggccaagaagtgggagtgggtgggtaggggagcagggcagggggagggtataggggactttcgggatagcatttgaaatgtaaatgaagaaaatatctaataaaaattgaaaaaaatatttacaaatgccagtggcttgtggaagagcagttattaaattgattttgtaaacatgaaacaaagaataaagcttccatccgaatgttgaagaagaagaagaagaagaagaagaagaagaagaagaagaagaagaagaagaagaagaagcagaagcagcagcagcagcagcagcagcagcagcactgggtgaattctcataggaccctccaagccaatgctaactgtctctggttggcaaatatttacaaggtgtgaactgagcactatgtaaggattcctgcctgagacagctgcagtcctcagctggccctgactctagactcatcagtggacctcagaaggcacacatgggacccccaacaggacctacctgttccctaggagggtgcagctctaagagctgctgttataagcagaaacagttgtggctgagagcaggcagaagggtcaattcttaccagccaccagtcaccattaaagtaagagccacccattcttgtctcctctccaggatccactcttggaaagcccttgggtaattacagcctccattgctgcctttggctgttagttttagtggattaattatctgccatgtcgagagatttcccctgatccctttgagatgttctttcccagcaacggctgatttagaatttcttgggaggtcagattggttgcgtggtttccatatcttcccatgttgtgtgaaagagagccgttcccagcctccctttctcctctggcttattctcactttctcaagagaagcctatgtgctaaccctggcaaccctcaaggacagggtgggtggtgaggaaaggaactcagctcctttgagtttctaattcaccctgagctgggtgaagcatgggctctctgtcttgggtccatctgcagcaagcgatgctaatccccagagcctctctgcccctagcatccctggttgactttgccagagcctaactaagctctgtgaagaaatcatctgagtgaaacccagttcctaactcagcagtgggcacagggtagttacttaatagatacggtctggaataacgagcaatgccctgcgttccatgggagaaggagctacagtctgtatagggctcacattgtctggaagggatttccactggataaatcaggaaagcagtcacaaactgacagacgatcagcaagcctcaatgatccttcctcccaccgtatccacctcccactgtgcttgggttacaggtataagtggtcccatgcacagctttttacatgggagctggagatttgaactcaggtccccatgagtgcacagaaccaccattagctatctccccaggctgagtttattttctttacatctgactctggctgcagtagcctacccctctgctctccccagttggcctcagcccctgtttacatcactatcaaatcctgctgtgacttcagaactcccactcagtttctatctagtgatgtttatcaaataggtagtgcctgataaagggatttggtgggtacctccagagggtttttataatattgtgttagctgcaaataaagtgtgaggattaagaaagatactaacaagggagaaatgggggaggtggggctggggaggaggaattctgcaactcagaagagccctgctgtgacaagactggacagttgaccttttgttaccttagcgcggcctctgggtcatttacatgtcacagcattagttcttcatacaccttcatgcattgtgtgtcccattagcatcttcaatcttcatccacgggtgtgtgttttaagattataaagattcagtcatgtttgaacactggagttatctctgggcctgcaaaagtgctcaatttggttggcctcggtgggtggggaaggaatagtgcatgagattttagtccacttcccagccttcctctttgccaacttgttgttgttgttgttgttgttgttgttgttgtttttctatgtgaatattctaaagctttgtgtaaggccttgtagacctctccctcacccctctcagtgcttcgtgcagaatgcatacatagcacaccgccgggcaaagcagtcatggacccagctgtggtcggatctttctgagaaaggcacatacatggagtgaaagtagagtgcttgtcataaaagactagcaggggctggggtgacttggccaaaaatgcacctgtgccaaggtgatttgatcagaggcctagagagggagttacccaggcaaagtgttgtagagtaagttccctgggtagacagatggaaagatgcaaagatgcaaagacaccagcactggaggaagatcaggctgggccagcagagctcagaacagctggagtgtgtcaagcactaaaaaaaaaaaaaaaaaaaaagccccgtgcaactgtgtcagaacacagtccaagaccggagcagtgtgagaatcaagtgcttgtgagagaactccaagaaaacaaggcaagagtctcgaggcctcagtttcttcacaacatgtgttgggctgtgtttctgtgctcctcccaggtgtagcaggtaggagtgagtttacctcagctgttgctattcggatgcctctgtggaaatgtggtttggccatgtgtgccctgtccttgtgattgcctcttaatcctcagagtataaattgtctgatgctctgaataaacttggctactgcctgagattttagtccacttcattttaaggctctgccccacccccaggttcacattcccaaccagaccagtaagtagaattgaagcattcccagcaaaggccgtagtatgagatgagatgacccagggtaagtggatgggttaagacaatgctgcagactgaaaagggcccagtgtgtgggagctaagaccggatacgtatttgtttccctttcttagacagtgtgagatggggcctcttccaagcagtgctttggagaccacagttctttcctctgtgcatctatgagctgccaaagctgtgtgtttgtctatacggaggatacaggagcacgttctggcccacagggcactcccatcttatactgcccagcatgcagagaagaacagaagtgctattggagtggtcctttggaggagatggagcaggtgacacaggcctgatgggccatgtcacagttccattcatagagtaccaagtgaggctgcatgagtgaacccacctggtagcatggcccccattacaagatccccacacgctctgcttcagacctcttagttcctgttcaggctctgttggccgtctgcactgtcctctggctgtcagaatagaatcactggtctgggtggaaacacagcactccagttggactagatagtggtttaaacaagaatacccttatagcctcgtgtctcagcatgcttagtccccagttgatgactgtttgaaaggattaggaggtgttttgtgtggccttgttggaggaagtgtgttgctggaggtggactttgagggttcagaatcccacaccaggcctgttgtctccccctctgcctgctgtctacacatcaggatataaagctcttagctctgtcccagcacaatgcctggctgcacgccaccacacttccctgccgtggtggtcatggacgcaccctctgaaacagtaagcaagctcccagttaagtgttttcttctatgagagttgccttggtcatgctgtcccttcacagcaatagaacagtgactaagacagccaggctcaatcatttgggccaaggaccccctcctgggaagtgatgtcaagaaggcagagatggggtgatcagttccttagtgaggcagtgtggctgtacctttcttcttcctgtctctttctgaggtgtgttctcctgacctgggcactcccgtccttgcagtgttttgggcagcttactcttctaaaaccactcttccagctctgtgtctgatctccatgccaggcccagtggcctttccccttctccctccatctgccccctccagaaagctgctgaggctcagggcttacccgcccctgaggtctttcttttaatctctaataaaattgtccttgtgtttccatttgagtccgttcttcgatgctttgattagcaggactgagaaccccacagtggggcctggattgccctgtataactcccacactcagggctaggtcacctcagcacttgtctacaaggctctgagctaacacagatagctgtgatatagaccatcccttctggggcactgagtcctggctgccatctgtggccacattgtcacagtctcaagtcatctttggagcttagtcaatgaacagtggacacagagctgaatctttgaacctgcctttcatccgtgcttaaaaaaaaaaaagttactggcttccaatttttctttttctagttggaggaatcgacactgatccaacccatctgtttgtttgtttgctttggtgtttttgttttgttttgtttagacaggctttctctgtgtaacagctctgactgtcctgggactcactctagctttgaactcagagacccaccagtctctgcctcctgagtgctgggattaaaggcatgccaccacgcctggcccctttcttttcttctgagacaagacttttctatacacctgggttaaccacaaaacctcttgatgttccttcacacctcctgagtactaagattagccatgcatcaccatgccatccgtcacctgttctttccaggctgttcctagtctgtccctctccagcctgccagggtgcccaacctcccactcacccagatgtgcttcctgccacacaggaccacctctgcccaagtcacctccttccagtttgctgatcaaatcctcctgggagccctcacccaagtctcacctcctctggtagaaataagctgtcacaggaatagtaagttcaggaggacttattatgcaaagacttagataatgcaaacattataaatcacaccagcaggataaatcccttttttctggttaataaataaccgctgcacattaccagtcctttggcacccatccttccggttcactctaagcttcctggatacatatggtctccctggtacctagcacaacctcagagcaagaagaagaaagagagggagaaggaggcggagaattattaataatggttgtctgtcattcctgcccttgaacagcagaggtactaaaaaaaatttttttatttgctattttaccatgcaatcccttgtaaaatgcactgccgtgggcagttcggggaggagcgccttttcaaccccaaagggaggccttgagcgcgtggggagggaagcagagatctgtgcagcttcctgcctgcctgtgggcttttgccaattcaggaagtgacttctgagggtttcatagagtgttcagcgataaatattctgaccttcatattcacaatccttttttctggcatgcaagaagttgcaagatctcagtgctttcgagagaatctaccttttggatttcctatgttatcaagatttatttttctttgtttggtctattgttgttttgaaataagaattttttttttgagataataggcatgaggcacaatgcccagtttaaaatgttgtttgtttgactttgtttcttgagacagtttcactatgtagccctggctgtcttggaactcactctgtagaccaggcaggccttgaactcagagtgattcacttgcctctgactcctgagtgctaggattaaatgtatgtatcaccatgcctgggttaagagatttttattgggggcagtggtggcgcatgcctttaatcccagcactcgggaggcagaggcaggtggatttctgagttcgaggccagcctggtctacagagtgagttccaggacagccagggctacacagagaaaccctgcctcgaaaaaccaaagagagagagagagagagagagagagagagagagattttaattgacataattgtccatatttatggggtagactattataatttgatacatggtcaaatcaggacagttagcatttctctatccttgatcattatcatttgtctgggttgggaaccctcagacctgtctctggtcattagaattgcagagtggattgctaaagaccatagttgatctctatggcatctccctttctctgattgtattttggtaaccaatagttaccagcctgtggctgtcatgtgacacactgcaccaaagccaagagaggccatcagaccaacagcccaattttcagagtccatcatgtcagtgggtttttgctcttcagtgactctggcaaaaaggagtccccaatgtggcacagccctccatgctgtttgtaaacctgcccggctctgtccaatggaaagctcaattccgtttagtttttctccctctcttaattggtttttccaaacgcaggttcagaagtaggagtttgatgagcacatgctcttgaatgcagggagttcccacccaccggtgtaagtgaaggtggcaggggtggcgagtctctcctacccgctttgataaagtgattattcaagagagggcaggaaggaagatcacacacacacacacacacacacacacacacacacacacaattacagaatggctcagccagcacaacctcagagtccaccctttggtaagtcctgttataagtatgtgtgaggtgcctcaaaactaacgtagtttaggtaactcaggattgggtatgtagaaagaagacagctcaggctatggggaaagaactgggtctttggaaaccttaagagaactatctgtgggaattcatagtcaaagcagacctatacttgagggacctcccagtcaggtgttctttgagctttcccaatttttcgttctctctgaatgagctgtagagcaatgtagcaatctttgcttgctgtctcaagcatgcttccagctttccttgtagaaagatcctgttctggatcttggttcctgtgagagcccaatagcttctcagaatagaaaactaccttcctttcaactgggccgctgcccagagccggggtgggcaagaacgagctgccttgctattggtgctcggacctctggcaagcagtacctgtgggcctccttgcagtgattacagggtttgggtgacactgggatctgggcagtggacagcagtactgtagggggctgttcttggaagaatgccgctcaccttcaggtttctacaccgaaattgtcacagctgtgggttcctgggatcgccatggatacgccgtccccagcaacccagtggccaggcccgcccgacagccatcatggctgaaccacaagcaaagccccctttccaaattaactattaaattagtatcatttcatccttgtccaaaaatgtgctcagagcccagacacgtctttcctgcttgctgggatataaactgtgccacgcaagaaaagcacggttctcagagaggcctttggatcttctgtaaggatctgtggttaggatttcactaaatgccatggtgggggttgggaagacttttctcctttcatcctaagccagaaaacagacgacccagcctgttctgtgctcatcatcttaatcataggctgagggtgaatatttttggttagtttcccttttttatacacacaatgcctatttatagccatttgttgttaggctccaccaaatacttggaaaccatgtatttagagagagacagaccaagattgtgaactggatgagaagccatcacactgcattagactggcccatgtgcggcaggatcagagtggaggctgtggctggcacacgaaggctgggccaggacagacggtctgcgagcacttaactagaagatgacaagacaagatgcatgctctctgtcttttaggcctgagctttgttgccatagctcattggcccccaagttcatgtttctaagggcattctgtgcaagaagccagtacaggctgggccagggaagttaaccctgccttgctcagccttcagagacgcttcctcctgcagcagaggggggcaaacacagagactcacagccaggcactgcacagagagtgagaggccctaaatgaatgtctccatcaaatccccccagggctcagggaagccagtggaaaaggaggcagaaaaagtggaggagccagagtgatggagacactaagaaagcaaggccctctaaagcaacagatctatgcacagagaaatttaagactgaaccagtgtacacagggcctgcttggcatccctgacccagaagcaatctccagctgataaccacttgcaaatggacttttagttttctcctggggagtctcactgtacaaacaaactactcttaagggtgggccacatgtccagcaggaggtgccagcaggaaatgaactcacagcctcttcggaggctccttgtctcacaatgtcagatgggattttccttttgttcttgttttaatcatatttttattttatttatatatattttaatttttttcttctctatttttacccttcaggtactttgcatatatattgtgacttccagtttagtgtttttatgggattccagagtgtgggagtaagtcagcttctgcatctatatctgtttcttgtgccttttctgggatttttttttctgtttgtttgttttgtcctagtccaatgcattaggttttgttttattttattgtatcttattccattgttacttgtttttatttactattaatttattatataatattttattattatttattttctaatgagagatggaaggggaagggaaactggaggagtagagggggaactggaagaatagggggaactggaggagcagagtggggatgggaggagtagagggggactggaagagtagagggggaactagagaagtaggggggaactggaggagtagaggggggaactggaggaatagaagggggactggaggagtaggggggactgaaggagtagcgaggggactggaggagtagggggaactggaggagtggggggggactggtggagtagagggaggattgaagaagtaggggggactgaaggagtaggggggactggaggagtaggggggaactggaggaggaggagtagggaactggaggagtagaaggagcagaaactataaagggaatatattatgtggggggaaaaatctcattttcaattttaggaattaaaaaaaagaaagaagcctaatataattactgtctccttgctgtcctgccaactaaatctcaagtctcctccctggatcctgtctgtgaccactctcctatcagtctagtttcccagttcactttcctctgtatctttccaccctggctctctgcagtaccccatcctttgcccctttatctgcccagcctatataattcttccactttagttacagcaggcagaagttggtctaaggcacctggatgaggagtctggaacaccacagaggggatgctcatgggagcctcctgatgcactgtcaaatacaaaggatttttctgacttttctacttctcctgggtcacaaggctaccaaggcctgtggtatgtgggcacaaaataaaggctagggagccagaaaagctgcagagggggtgggggtggggctaaagaagctgaaccttacttcacagcctaggccaaaactaagaggtaaataataaattccttttctgagaaggtggggttgtaagaaaggggcagtgagtgagtgaagcaggagggccggacgctggccacatgatccctggggcagtcctagggttagagctgtgaagaattccacggagagaggaatgtgagtaggtggtaagatcataaagtctaaaataccaggtgggatgttgagttccaatctggagaatgaaggaaaacattaaaagctgaacagagaaggctgaaaaagaaaaagaggaatctggagtgtcttagttagggtttcattgctgtgaacagacgctgtgacaaaggcaactcttagaaggacaacatttaatcagggctggcttacaggtcagggattcaatccattatcatcaaggcatggcagcatccaggcatgcatgcaggagtagctgagagttctacatctttatcttcaggcccttaggagatgactgactcccacatggttaggaggagggtcttaaggccatgaccatagtggcacacttcctctaacaaggccacatctccaaatggtgccactccctgggccaagcatattcaaactatcacatggggagatggcttagtggctaaagccttgacatggaatgaggaccaggatccccatcttcagtatcgagttaaaactggttgggcacgcctgttgcctaaatactagcactagggacatagactcctaggacaatgtggctggttactgctagctgagcagaaaggtacactctaggttcagagagagaaaagtagagagcactatagaacattgaaaggagatagttgatttcattttcaggcttccatatatacatgtgtgccctgcacacacacatgggatggaggggagggagggaggaagggagggagggagggagggagaaaaagagagagagagagagagagagagagagagagagagagagagagagagaaagaagagggggggggggggaggagaaggagggagaaggaggaagaagaagaggaagaagaagaaggaggaggaggaggaagaagaagaggaaggagaggagaaggagaagaagaaggaggagaaggaagaagaagaagaagaaggaggagggaggagaaagaaaaaagaaggaggaggaagaagaagaagaagaagaagaagaagaagaagaagaagaagaagaagaagaagaagaagaaaggaggaggaagaggaagaagaagaaaggaggaggaggaagaagaagaggaagaagaagaagaagaagaagaagaagaagaagaagaagaagaagaagaagaagaagaagaagaagaagaagaagaagaagaagaagaagaaaggaggaagaggaagaagaagaaaggaggaggaggaagaggaagaagaggaagaggaagaggaagaagaagaagaagaagaagaagaagaagaagaagaagaagaagaagaagaagaagaagaagaagaagaagatctttatatgcatcttttacttggagatggataaggagactctgaagggacaagacctttgcacaaaaagagatggtctgccaggactccaagttgccttttcccccatccacaaggtcttgctctgtagtccatgttaggcttaaactctcaatcctctggcctcagagtccaaggagctatgattacaggcatgtgctatcatgcctgatctttgggctttcataacctgccacatacatcttattgggagctcagcccaccctctgagccctcccagggaagtcatatctcctctgggttctccctggcaacaatgtttattgcatattttacaatgtggggtgtttgaaccaaagcatcctctcatttctggccacactctgacttcttttattctgaggattggtatgtagcagccacagtgatcaagataggttatctgctttatagataaatgaatgtatcaaataaatccttcaagatttagtacaaagtaaacatgcagtctacttcgggtaccaatggtgatggcttcatttttcagtgaggtccccagctgacagttcagcgatgcttgctttctgtttcatgcctgaccttgctcaattgacactcctggctagtgtcagacactacctgactattgaagttccccgtaatcaggctcctttctgagtagtcaccacgcacaatccaacagtgattaacagagctctgtctaggctgagcaagtcacaccagagttgtcttttcacaaggacttttaaaatatcaactacgaactgagtgagtaggtgtcagaggaactgactttgtaaactgaaaattatgaacttagattcatttgaaacacatcatatgaagtgtatatataaaaataatgagcattttgattccccccccccccgtaggtaataaatagcgtctgtaatatccttccccaccttttcctgattagcttcatgtctggcatattttccccgacactcctgtttcaagttctaaggatttcgccaaggacagacgggattctcaataagtagtgtgggtgtaacagaaaacttgcactaatctggtgaaagtctaggaaggaacaggctgtctaatggcagccaggctgcccctgctacgtgtttttacagtcagagcttgagctccacaccctgagcttcactctcgcctggtgtcctcacctgtaggggaaatggacaagacacaaggaggggctaggggagggaaggaagaactgttgctaagctctctgtgcttgcacaggggtccaggagtcttccccaccgcgtcctcctttcggggtactctcctcttgtctccccagcaccgaaacctctcctttcctgttctctctctgttcttccttctactccagtcttctgccttccagcgtaacactggacaggctgtgtgcacccatggcccctgcacaccaagttctcaccccttggcatggtctatgttgtaactggtgtggcagagatgatattctaaaggggcagactgttgaaacactagacccccaagaaatgggaatttccctaggagatctcatgctgtggggaggaaaggggacagacagaagggaactggggacttgcctccctgaaagggatttcacagttttaacaacctgtcagaccaccttacaggatgagattaaacccagatgctgatgggtcagctgtgggcaggaccacaccttgcttagatgagggtattcttgattctctatttgaacttgatctcacttcagaaccctgaaaaaggacttgaagagttgatgtccctccaccttgtccttcttcataatctggccacatcagacaaatctttttctgattcctgctttgacatggttcttttaattggcttattgggggcaagtgtctaggtctgaatttcattcacagactgggactcccaagttccaaaacaatgtggcctcactaaacacttgaccctctcacttgacttaaagcaaatgcaacgaagatccttgactctgttcaacttcttcctccagatttatacacgagttagagttgcccttctgaggtggtccctggtgtcattgggacagtgtgtgagactaaactggaaaaaaaaaaacagtacttgaaacaacagcaagcaagtggagagtccacagctgtgccctggacttggagtgagcctgggcagcaagccccccccccagtgagacaaagtccagtcgagtgtttaggcatttcaaacaacctcaagacagtcttgatgaagccattcaagtttccgtggaaactgtcagatgacagtttctgatgtctgagtgtacagagagatgacagggtctgccacagctcagcacacatatcccattcctaccccacacctcagcccacaaaaaaagtcataaaataaaagccatagcagtgcctgtggctccccagcgtcctgctagccgctgtttccttggggagcccttctctccccacctgcactaatcaacactctgctattctgagagtccctgctgcccacactcctggcaacactcactgttgttgcttacatgcaatggtctttctctgcctggctgtagccagcagcagcaggagctccagaaattctcttagggatgcataagcagtaggtacttacttagcatatgttaggtcccaggcaccattccgtgtgtgtgtgtgtgtgtgtgtgtgtgtgtgtgtgttgtgtgtgtgtgtgtgtgtgtgtgtgtgagagagagagagagagagagagagagagagagagagaccacacacacacacacacacacacacacacacacacacacaggtcaactgagtaaatgaggctctgtttctgagggggcaatggctgtatgtagttctatgctgttttctctctgttctcttcctttcctgtctgattcctaagcaatcaggaagacattcctccatagggatgtgtaaatagttaacaagcccaactgggatgatgttttgcaagagggtgaagaagaactccctaagacggtgattgcttggttctgaggacagtcactcataacaatgataagtgtagatatagtaaaaagagatttgtatttgaggaatggagaagtgttcctgaggtgcccacagaaggcagggaggaaacaatgggttggttaattaaaggaggcgcatataggaacgttacagttactgcagctggacatccaagggacaggctggttgagcaccatgtcctctgtgggactgtcctacagcagtaactatatgacatcagtacagcggatgctgataaagatggtaccgtcagatctctggggcaggaagagggccaggagcctaggtcagctcagactgggccagatgatagactatggctgagctagctgggctcacagagccagagttgggtgtcagagtgactgcaggccccagctggtcccagtctacaagaagaaggaaaaaccacttttctgcttcactctgtttttatttgggacctgatctgtgatatcggatataaaatcctatatcatgtgctgtagctccctataaaactttctaacaacatcttgttcccatggtaactggtttagaccacacagttggcatagggccggacaactggaaacaccttgactttaatagttgccaaccataggtcataggttaagagatgaagatgacttctttgagtttattggtgctgtccatgttccttgtccaatggcaactgcacggtgattcaaaagccacgcaaactgggtctccacactcagtggtgcctgagttcactatccatagactctgattctatctcatgttcatcctctgagctgggcagtctttttatacttgttttacaagcagagacaaaatagtgcaatgacttattatggtgacaaaaagcagtcgatgtaaaggcctctaatatataccctggtgtccgggtttgcttttagaactgcagggtggtgatgtagggtctgatccactaaagtcttcatagatctccacatccttgaagctagtgaagaggccatgtttctttttccatcattagaagttaaccagagttcctcagcaaagcatcagagtgggccagcaaagcatcagctcggggcagggtgcagggtggtggttgttctatagccagcttaatatttaagaaaccattgttaagaggaaaacttctatatttagatttgtaatgttttttttttaaacaaacaagacaacagtgttcatactcacatctggctgtagaaggctctgccatacagccagatgagaacataaccttagccaagcccacagtgactgggacatgaaccatgaacaccctgaagatttgatccacatgtgcagggagtctctatccagctgcagcctactccagctgtagggagtcaggtctggtgggagatgccatcttccagtcggagacctctcaccagccagcacaagaaggtgtttgaacttcacctagatttgggtcctttaaactttgaccaggaagaaatgatcagccactctaatggttaacataagttaaacttcaatataaattgtgagagatatttaaagggctggagagatagcttaagggttaagaacactgactgttcttccaaaggacctggattcagttcccagcacccacatggcggctcatagctgtctctgactctaagcctagggggtctgatgtccacgtgtacatacacacacaagtacaacactcaggtacataaagtaagaataacttttaaaaggagatgtgagatccacataactagtagccagcctcctcccagcaagcaagcaggcctgacagaatttcaaatgagaagacacttggacaaccagatttctgaaagagctaacgtttgctgaacataatcttggagaacattgcactgttagtaaatgagcacgcaccctttgcattgaagatggatccagcactcgggaggcagagggatctctgtgatttcgaggcttgggctacacagtgagttccagggtactactacgactctatctctaaaacaaacaaacaaacaaagcaaaaatggggaaatgataaagcaaatgggtcagtcggagaatgaaatatttaaactgttctttataaactatgaagtaattcaaagcaaggagattcattgggggtgggaacaggccagacaatagcacgggagagactaaacctcaaaataaattgtaaatttattctatccatacatatttttcttcaactctctcctgcttctggaccaggatggagcaagcacaggtattctccagtcccatatcaagggggaatctttgacacttctgctttgttttcctgggataataatcactttgcctgtctttcttcttttgctatttttctctaccttggtataagaagattaaataaataaataaataaatacctatactacttcatgacactcactaaaaacaattgccaagtattgctgcccagcttatagagccagtataggagttaagtagtttaacaaacagaaaacacttaaaatgtaataaaagattatcacacagtcatttgtacctcatatagtagacgtgaaccaaacaaacacgaaaatttagaaagacattttaatagcatcaaaagagagtaaaatacttaacaaagatataaagctgagtatattagcttggtggtagaatatgtattaggttaaaaaacatgtgttaggtaaatagccaggcatggtaacatatgcctttaatccaagcactcagggagtcagaattgggtagatttctgagtttaaggccagcttggtctacatagcaagctcctggctagctggggatgtatacacaatgagatcctgtctcaaaaaagtaaaattataaaatcagttccttgactgtaccagccacatttcatatgctccacagccacacgtggctggtgcctgaagcacagcccagcacagacacagcccactgccagcatcgtggagaggccccctggatactggagctttaaggacagactcagcccttggggcagttggcaagggtatcacaacagatgagtgcagagaagacagccttttgcactgaatgatgtttaaatagttaaaatccatatctgaaagaagaagaagaagaaggagaaggagaaggagaaggagaaggagaaggagaaggagaagaagaagaagaagaagaagaagaagaagaagaagaagaagaagaagaagaagaaaaggaagactcttgattcctacccttcttcatagacagaaatcacctcttcgtgggtttcaaaatccaacgtaagataaaggtgttggcttttcaccagtggactgtctccagtgatggcagtggaggaagcagccaaaccaggctggttcccgttgctacatatgatttaattaatcatgtaacagttttgtgggcatgacttatcagactaaacatttttgaattaaaaggagccagaagtaaaggtaaaatactgcatactctctgttcacagagagttcaaaagcaggcagagggcgtctttgctgtccagagataagtcacaggtcccttggagagaggagggagtgtctggaagcccagccacgggtccgacaccctggtgatgctcaacctcctctctgtcaggctgtgcatctgtgatctgcactattttccctacagggctgtagaagggtgtgtataagaactcctttctttagcactgaaaaaatggttcttgttgaataaattcttcacaaagatgaagttctttcaagaatttttaggtggtacaggactcagaggaatggggatcatctgataggagagccaattgctgtgttggaaaagcatggaccttcaagtggtcagttctagacacagaccccagagaagctccattccttgtgtaagaagttggcagtagtactcacgtggggtaatcaataccagacacaaaatgaagtgggctgagaacatcaacagagaaacagattaacatgctgaggtatgttgtatagtgaatttaaacagtgaagaggcatacgtgcacttatataattacaaaactctagagagggaatgatagttatagcatgtgtataataacacatgtgtgtaaagtatgacacagggctgtgcatattcctcaacacacgcacatgggcctgcactttgaaatgtctgaggatgcctagaagctataggaacaacagcatgtggaacagacaactgatggcaacaacagacaacaaaggagacttcaacttgatcttgttgtccagtttcttttgttaaaaaagcagtgtggggctgggggtggctccttgggtaaagggcgcctgccgccaagccagacaacctcagttcaagcccctggatccacatgatggagggagagaaataactcaagctgttcactgatctccacatgccacggtgacacatgcacgcctgtgcacacatatgcacatacacaagcacacacatacacccacacgcacacaaacaaatttgtgtaaaataaataaaatgtaagagcagttttttgaaggaaatgtggccaactattaacatctgttcacatggtgaccgttctagggagttagtatcctttgacatgctctctgtgttcagtcactcaaaagcagagaaataaagttgagataatagtatcattcatcatttagtctagacgtgtcgtttaggtattctctgctcctgtttgttttcagaaaaacatgtatataaatgtaagtagtgcagcaatagcagctccctcccttctgtttatgttcaccaagtcatgcttgttttatttaatacccaaaatgtttgatattgaaatgtgccctttatacaaactcgtgagggagattcacggttttatccaagcctgtgcgccagccatgaacccccttcctgtgatgcacatctccacctgtctccatcactagaagcatccgtttgtgttacagccaaaatatttgcaagcaaagaagcaagaaattagccaggttttccttgtgggtgcctattaagactgaaaccgctgatgtgtgctggatcggtgcccagacttggaaagactggcaagggataggactttcaccttttccatggcctgcagaacctgtgccaaaccctgcatcaaatccagggagccctgaagctctgtagagcatggcacaacataccaagttttgttgtcctttgactggcctggtcttgaactcccatctgcctttcacctcctcggtggagtgtggacttccttgttttggtctgtgctctggcaggtgctggggtcttgactgtcttaggcaagggctctgcagctaagctctgcccccagccctgttttacttcattgtctttgagtctgcacttttacaggcataaccacacagcctggcatgcacttactaacctgtctacttgttcagtaaaacaaggggaccttctgaagtattcccaggacaactgccttgactacatttgaaaagttaagaaagaaatgtgaacttaaaacagactaaatagtattcagtgaggtccaaaagttgaagcttatagatatgtaaatatgtactcatggtcatgagtacacccatcccttgtcatcacgggtcagcaatgtcctcagctaaagggacctgtacagatgagagaagaagttagccagaaagaacagactgagtgtgctcagctgaaaccctttcctgggtctaagtgagagccagcgtgtgtcccagattcttgcacgcgctcaactggccaggaagaacgacgctgcaacaggatccttctgcacacatttattgggagagcattgattgcataggcgaaagaagaacaatgaacaaggaaaatgatgctgcttatatacccctccatgtgatgtgtcagctcctgattagctgctcactcattaccccactactacgccccgggatgggcagtgacttggcacgaatttactcttgcacctgcacacattacttgtttaccagttaggcacagcggaggctcatgatggcaattgctcacggctccccacaccagatgtttgcagtctgatcctcaccgtgtgctgtaagggagccctgagattgtccagttactatagctaagtgaaagccaagggccagccactcgcacagctctttctactgtgagccaaagccacattctctagaggcagtttcatcactagagaggtgataattaagctcagtctatctggctctggctctggctctttttttttttaagatttattaattgtgtttatatgagtatatgaatacactgtcactgtcttcagacacaccagaagaggacattggatctcattacagatggttgcgagccaccatgtggttgctgggaattgaactcaggacctctgtaaaaacagtcagtgctcttaactgctgagccatctctccagccctggctctggctcttaatgggttctaaacttgagaggaggatgaatattaataactgccccctcagaaacttgatcaactgctataagaccttaaaatgataaattaatataatccatgtgtcttagttaggctttcccttgctgtgaagagacaccccaaccaaggcaactgtataaaggaaagcatttcgttgaggctggcttacaggttcagaggttcagtcctttatcatggcagggagcttggcagtgtgcagtcaggcatggtgtaggaggagctgagagttctacatcttgatccaaaagcagcaggagactgtcttcctgggcagccaggaagaggctccctaattccactctggggaaagcttgggcattaggagacgttaaagcccaccccacagtgacacacttcctccaacaaggtcacacctcctgatagtggcaagcattcaaatgcttaagtctccggagcccaaacccattcaaaccaccactactttatatgctcaaacagtttctatacccatagttattctgttgaatagttaaaaacactgctcactaatttttacatttcatgaatggtttaaaaagaaatgcatctgtagtttttttgtactatgcttaacctctcctagcttgtcagagacttcaaaaaatgtgcattttataattttatatactatctgcaaaggtacaaccattcgcagaaaatgtatttcacttacacatttaagaggaaaaagaacacacatattcttgcacactcatgcacacacacacacgtgcgtgctcatgcacacacacccataccacacactcatgcttgtgcacacaaccgctgcccagctccgttcctgtagtagacactgctatgcacatggctctgcatgttggcgggaggcaatgattttaaggatggattagccttctaatctccttgggatttcctttatatttgtggtggtttatgactgacatctaatgtaactatactttgtgtttgtatttaataaaagattcgtttctgtggcaggacacacatttgtactctggtgttgaacaaaggctactgttctgcaagaagggtataaaatgttgatttataatgacacaggccaataacagcaatctaattcttccaaactatttcttcccaggtcctggcaagaacatgactccagcaaaggacgattcttttccgttagaacattctgcctttaacacgtctatccatgctgggatcagatacaaaaattggaaactcctcacgggccacccaggtagaatgcttcgctcccttcctgtggccaccagagtagggcagtgtcctcagcctgtcctctgggccttcattccctggactgtgtccatagaaagggaagtccttatcactggctacaccctcctcctcctccttgcctagccggctcctcaaggctccctgccaacccctcagtttgctcagacatctgaaatgtcaactagtccttcagatcttttacagtccctgcagatcttaaggaagcagctatctgcttgtggtttcatggccttcttttaagcctctgtctggtccatattacacaacttctgttgtctgcctaagtagacttcccaccaaacagaacagtgagagaacgctcaccaaaatgagagctgactcactttttttttgtaatatatctctgaagctgcagggtgggggagtggcttccgctgctcattctgaccgtcctccgagttgatatttgttgttgttgatgatgatgatgatgtcatctgtagtggggttaagaggagaaaatcccacttgggtgcttcataaacatatatggatttttagacatgtgtgactgtcaaacatagcacacccagccagctgtagatcttcaccaattctctggctggggagagtctgcttcccctcccccttccttagaaagggacagcttcactgttttgtaaatatgggatatttccacaggctctgatgcagtgtagcaatgcttagttcgtgagtgttcttggtgtttacaatgacagttcattgtttgggactgtcccatgcattgcgagagatcttagaattactgtgctgttgcttgatagcaggagtaccctcattgccccagccatcgtgacaactaacacccccatcctgcttccaccccacatatagtttttaatgtcccttgtaacgctataggatccgtatcatcatggcatggaaatcgtattctgaactcgacatcagaaggcacaggttttttgtttgtttcttgatgtacgaccatacccacaaagccaaggaagccttgtacccagattcctgaaattagaacccaccaacagtgccccccacacacacacacactaaagtttaatttctttaccaggctgtggttactggttcccgcctccgtctcagtccaacgtctctgagatacctccagtggacccaccaaccaagactctctggctttttgatatcaatcaggaccctgaagaaagacacgacgtgtcccgagagcacccccacatcgtccagaaccttctttcccgcctgcagtactaccatgaacattctgtgccttctcacttcccacccttggacccccgctgcgatcccaagagcactggtgtgtggagcccctggatgtagggctctggggagtaaggggggctggagcccatttctgggcaggctagacctcaggcccctactcccctggcttctcttctttatcatcccccaccctgtcacctggccctcatgctacataacccaccaaaggagtccaatttcaacccacagtacattctaaaagccagtaaaatctggaaggatcttgctgttggctggagttagtgtctggggccagggtggccgggttcatcctgcttcctaaactacagacgctgggaacttgacataggaagttatccctgagtcctggaggccaggacagctggctctttttgcttcacaagtcagctgttagaactccctctgctaataaccagctttattggcaagacacatttcttgtaacaaaggcagggagcagatgttgctagtggttctgttggctgtgagtgctccctgtctgtgagctcttactcgggctttccgcacccatgaccctaaccctaaccctaaccctaaccctaaccctaaccctaaccctaaccctagccctagccctagccctagccctagccctaacccatccgctcactcatcttcctgtggagcgcacagcccattgcagtaagccagcatggagacatgcctgtgccgtggttttggtttccatgataactaaatgtgtttttatctccacccccacccccacccactattgctcattctgtctagacttctgctacccagcttgtgtggctctgttcctgtcatgcctttggacttcactgtcctgtgcctgaggtctctctcccctctgcttcacccattctgagctttaggatagtcctaagccctgcccagaggaggtggactggtcattctgtgtccatgctaatgggagttgtgggtctgtggcatctgctaaggaggattattcacagttgcatggaatctgtcaagattgtggctatatctcccactatgccatggtctatgctgttttctcaagcagtggcaagaaaggccaggatagcacttcttcgccctgagcagtctcagaaaggaagtggccatggaatgttggcctcagtaaggcagaggagacaccatccatgtccctttcattctctgtttcactgccctgttctggggctctggattctgggcttggagaatgaggatacactatttgactgtcagccctttctcagaccctcatacatcttaccgatgtgagtccaccagattcgcagcagggtgtgtcaaacccagtggtacttctcattaacacctctgtctcattcacagtttatcaccaacatcagcaaccatgtctgcgacataatagatagccagtactttttaaaaatgaattaataaacaaagtaaacgagaaagagttacctggcatttactagtccagtgagctgactgtaagggcagaataaatatcctccagcccttccgattctgtcctcaagctgtcccctcccacctctgcgctagcgggagaatgatctgggcagtcaatgaatggcaggtctgtgatggcctctgcaggtagacaaaagagaattctgcttcccgggaagtctcctttgccagcaatctccatttccattcttcactgcacactaggaattaaaaccaccaaataatatgatatgcacagtcatcttcagttcagtagcagcatctcctggtcattaatattctgtattttattatggtaagagtattataagaaaatggtactatggctaatgacatcttttaccaacctttacccaacttggctgacatatagcctgccattaggacactttttactccaaagactgtgacagagtctgagtgacatgagtctgaatactcctcctgtgtcctcctgtagctataggtggactgacggtccctacttcataacacctacctgatcgttccttagtgttctcagaacagctgtcctcagttccagctgtgactgtaggcagtgtttggaatattagcataactaatggatttaagaagactttcagaaagtgattcttaaaaataactggaggttttgtctgataaaacaaatagaatggaatatgtctcagattatatctcattggattttcatgtttgatacaaaagtaaaagcttgataacctatttttagagatattaatgttagttctttccaattttgtttaaccttgaagattttatttaacttgtgaacttactcctttgttatgccatgattgttccagatttgaggaacaaaataaaataaaatctttctaaaacta

SEQ ID NO: 8 - DNA, 171503 bp, synthetic construct
  misc_feature 1..171503: note = Synthetic
  misc_feature 1..88907: note = Mouse Sequence
  misc_feature 100..102: note = Start Codon
  misc_feature 18361..18547: note = Exon 2
  misc_feature 22350..22540: note = Exon 3
  misc_feature 35818..36025: note = Exon 4
  misc_feature 89946..89979: note = Lox71
  misc_feature 89980..91106: note = Inverted Mouse Sequence
  misc_feature 90381..90624: note = Exon 5 inverted
  misc_feature 91132..91165: note = Lox66
  misc_feature 91172..91203: note = Rox
  misc_feature 91210..91235: note = I_Ceu
  misc_feature 91236..91241: note = NheI
  misc_feature 91242..171503: note = Mouse Sequence
  misc_feature 108975..109045: note = Exon 6
  misc_feature 167714..167836: note = Exon 7
  misc_feature 168953..171503: note = Exon 8
  misc_feature 169216..169218: note = Stop Codon
  source 1..171503: mol_type = other DNA
ggcccgcccaggtggatgaaatcttgctggggagcccggccgctcagttcccgattctgtcgggggtgcccgcagcacgggctctgcaggctgctaaggatgggcaagcttagcccgtgcactggcaggagccggcctggaggtcccgggccgcagctgccactcttgctgctgctgctgcagctgctgctgctgctgctgtcgccggcccgggcctccggagctacccagcctccgcatgtggtcttcgtgctggcggacgacctgggctggaacgacttgggttttcacggctcggtcatccgcacgccgcacctggatgcgctggcggccggcggcgtggtcctggacaactactacgtgcagccgctgtgcacgccctcgcggagccagctgctcaccggccgctatcaggtactaggcggcctccagccccgcgtgaccccgcgagcccgccagctcagtcggaccgcgctcgacaaccctggcttccccaggctgctgcctagggccactgcgcatgcctgacttcctcctggtggccgaaggcaggagtggctttcgttttctctaggtcagaggagagcggggtttctgggatctcgaggtgctgtgtctgtgaacccccaaagagaaggatagacgaggtcctgaggagaaaggatggagaagaaaagggaggcccaaggagctccagagggccattaaagtgagaggctgcactgggacggaccctagtgactgacgcggtgtgtcatagatcaggagtgacctacttgagccaggaggataggaagccatgtagatgggagtttcagagattaatttagaaacactaaaaagacttgggattgttgacaagggacgcatcacccgaaaagccttcagtgaatgagcgtgggggtggggtatgtgaaagatcttaagctttctctcagcccctgttgtacctgggagtcaggccacaggtgagataaggtgcaccccaggctcctatatctttcctttactaagttacccccttgcctataactatgcatatgtcaacaacgtggaaattccagcacccacgctcagatcctccgctgtgcatggctaacaatggaagtcatttccaggttctccgtacccctacaatgaaaataagggtgctgatatttcttctacctttgagggtgaatccagcccacatgagtctcttcactgcccctttagagagtatgtcccccacagagtatgtgtatgttaaatgactgggaacagtaagaacgtatcttgtagtgtttttattgtactgaaacgtttttaaaaaccactttatgaggtagttatcttgaacgccctttacaggcgaggagatagcttgcctaaattggatgtcagcgggggagtcacacggctataaattgcaatccttagtttcctgcacctactcgtctcagacctatgaaattaggctcccctcaatccaagtttggtgggtttttaaaatcctgatgtgattatgatcaaattaaatttaataacttttagtggttactgatattctctgtctctgtcctttcttccctttctccccttccttccttccttccttccttccttccttccttccttccttccttccttccttcctttctttctttctttctttctttctttctttctttctttctttctatcctacacacacagtcacagtcttctggcctttcttcatacagagatttagacaacatggtgttagtatggctctcgatacaagtcagccaaagatgtcagatagcagatactcaaggaaacacgcgttagcagtaaatataagtgtgatgcactccactgtgtaatgggttataagtgtttattcagcaagcattttgagcttactgccctcctacatatgtgtctacagaacctctcggatcaaacctcatgttctaaaaatggttccagcagtgattcaaagactgaagagagaaggtaatatttttccgagggactcagaaatatctgtaggcagagtttactgtggagctaaagcgtggtttgctctcccactagcaataagggcatcccagggaatccagcaggctgctgtgtttaatcagctagtccccaggccagagcgagtatctcccagcacacagtgggagtctccacaccactgctcctcagaagtagggtgaggtggttctgcatttgctctgaagatcaagaactggactcacgttgcaaaataatggagggtctgtttatttatgcaacatcctcctaacagacatggagagaaaaacaattcctgcatgtcatgcctcacttacaggattgattgctttaacccctaatgtgctacatctgccaaatgcttgaaaatacctgagtattggaagtaaagctgtggttaatagttaaaggaaaaagagaagttgtgtacttcaaagccatctgaggcgtctcagaggagctgactcaaacacaatctgttgcggacatcacaagatcctattaaggattactttgcttagtgatatacttttactggagtctaccaacgatcgttgctttcaaataccacatgttggtacattctcagtacctttctattgtgcttcaaaagctaattaaaacagaatggtttttatacttaagtaatttgaaactgacggcagtctcatgtttaaaatcattgtaagagctgaaagaaaatatttgggctgggcagtggtagcactcgggaggcagaagcaggagcatctgtgagttcaaggtcagcctgctctacagagttccaagacagccaaagccacacacagagagaccctggcttgaaaagccaaatacaccatattttgggtcttccaaataatcaagtattttctcccatagcaacctctttatgtttcttggagtcatagtgacttagtagtggagatagttctgaaatatccaaatatttttctttgtaatatcggtgttgttctttgaaactggcttctagtgtttttttttaaagaattatttattttttttgtttatgagtacactgtagcagtcttcaaacactagaagaaggcattggatcccattacagatggttgtgagccaccatgtggttgttgggatttgaactcaggacctccggaagagcagtcggttcttttaaccactgagccatctctccagcccctgacttctagttctcctgttatgatgttatatttatactaaagagcagtggtttgacagttttaaaagctatgttattagcactgctttataacagggtcgtgtaagctgaggctggaagaaggtagatatgttgggaggaaaggacttgggtggcaaaacacttgccttaccagcatgaggtcttgacttcagatctctagaaaccacagaaaacatcaggctggtgccacatgtctaatcacagtactggcaaaataggaggtgggtccttggaaggtcatcggccagctagactgctctctctctctctatatatatatatggtagagttcagaccaatgggagagcctgtcttaaaacaaacaagtgaaaggtgcccgagggctgacaccttaggttgtcctctggcttccacaatgggtgctgtgcatgtacataccttcacccacatttacacacacagccacatttaccattcacacagaagaaatgtgcccaaggccacagggctaagaagtgatggattgcttatgaaccaggcaatgtgctcagaatcagtatttatagcaactatatcttgtttcctccttagaagtgttaaaaacatcagcagtgtaccttcatacttaataatatctttataatgtttaaccttttagctactcttaaatatctctatctgaaaagtgaatcaaaaattgcccatgttaagtgcaaaatgggaaatgaatcttatttctgaaagaatcactcagtacaagaaaatgaacattttgttaactatttcaaagttagatacttataagaactagtcgagagtcctgtctgtgaccttggcagttgtgacggttggttctaattgtcaacttgatagtcccttgggaagccagtctcagtgagagatgcctatatcagtaaccttgtgggcagttgtcctgattgttcacaacagccactgcactggccacattccctgagtctggatcctgggctggggagatggagaaactgagctggcttggaagcatgcgttcatctctttcaagcgctcgattgtgagtgtgatgtgtgtgtttgattggttatcttaagtgcctgccttgactttcctctccagatggactgtaacttggaatttcaacctaaaatagccctttctcctcgaagttacttctttaagtcagagcatttgtcatcacagcaatagaattaaaactaggatgtcagtcacactaatgtttagagaacatctgtcaaagtaacttttatttgcctgaggtaactgttgtctccgaagcttactgcctcagcaaacctagacgcagttctggaagcttctagcctctgtacaatcttaccggggtctagaatgttttcagcctctcaagagttactgctggaaaagcaagctcaccctttcttgttctttctgagtcctggatgcccgattcaactcggttgttctggttccaaactcctcttcacacataacctggcctctggcttccctcagcttctcttgaattgctctgcttgacctcaaactaactcaggcaatgtgttctaatcttctggctccttctcattctctggctcgttctgtctttacctgtgtctagcatgtcctttcttcaacttgtctctctataactgtccctgtaaaactgcctcctttttctgtgctgctctctctctctgtctctgtctctgtctgtctgtctgtctgtctctcttttaaagaattatttatttaatgtatgtgagttcactgtagctgtctttagatataccagaagagggcatcagatctcattacagatggttgtgagccaccatgtggttgctggaatttgaactcaggacctctggaagaacagtcagtactcttaaccactgagccatatcctcatctcctggttaatggtaaatacaaaaactagacagaattcagtctctcactgaattctagtgttctccctgtgacctttattatctttaaaacctgtctatatgctttatttttaagtaggaaacatatatggtgtaaaaacctaaatctggtaagagggggtttttagttttgtctgtagtgtagtccctgatactttgtccctgttccagtaaaatcttcccactgcactttaggctagaaactctaatgaaactcagtgggtctcacacaaaaggaagtcatgagcataggaggggaactggctgagaagggctctaatgggagacagggttggggagtggtgagacattgaaaacagttaatatctgttatataaatatatgaaactgtcaagtaaaaaaaatgtaaaacctgccaagcttataaaagggcttgcattgaaacattccctctactctaaccctggtccccagtgtcttagacatttggtccccgtgtttatagggaagtatacagagaagtgttgagctgtgaatgacaggctcctcagaggtaccttgtgcctgtacatgcaaatgcatatgtacatatcccattacttttatttgaatggtagcattctcttcacatgtttgtacctatgtttaattttgctaagcacttggcagcatcacatactgtctataaatagaatcctcatttatgactacacactactttgttacctgaatgtaacatttttaaccagtcacataataataaatataaacataatttccagccttttgttgtatcaaagaagaactcagtatcttgtacacatgtccttttgttcatttgagacacgtgtgtaaaacagcttctcaaaagagtgggggggagtagggagggtcgggggacttttggggtagcattggaaatgtaaatgaagaaaatacctaattaaaaaataatgaaaaaaatcaaatttggaggggtttaaatgtagctaccatctgtaattttgataaatattattaatttgaaaattaaaacaaaatctaaattttttgcatttttattatatattttctttatttacatttcaaatgctatcccaaaagtcccctatattctcccccgactctgcttcctggccctggcattcccctgtactggggcatatgatcttcgtaagatcaagggcctttcctccccttgatggccgactagaccatcctctgctacatatgcaactagagacacagctctgggggtcgggggggaaaggtactggttagttcatattgttgttcctcctatagagttgcagacccctttagctccttaggtactttctctagctcctccattgggagccctgtgttgcatctaatagatcactgtgagcatctacttctgtatttgcctggcactggcagagcctcacaagagacagctatatcagggtcctttcagcaaaatcttgctggcatatgcaatagtgtctatgtttggtggttatatatggaatggacccccgggtggggcagtctgtgaatggtccttccttccgtctcagctccaaactttgtctctgttactccttccatgggtattttgttccccattctaagagggaagtaagtatccacactttggtcttcttgagtttcatgtgttttgcaaattgtatcttgggtattctaagtttctgggctaatattcacttatcagtgagagcatatcatatgtgttcttttgtaattgagttacctcactcaggacactatcctccagatccattcatttgcttaagaatttcataaattcattgtttttaatagcaagtagtactccattgtgtaaatttgtcacattttctgtatccattcctctgttgagggacatctgggttctttccaggttctggctattataaataagactgctatgaacatattggagcatgtgtccttattacaagttggaacatcttctgggtatatgcccaggagaggtattgctggatcttctggtagtactatgtccagttttctgaggaaccgccagactgatttccagaatggttgtaccagcttgcaatcccaccagcaatggaggagtgttcctctttctccacatccttgctagcatctgctgtcacctgaatttttgatcttagccattctgactggtgggaggtagaatctcagggttgttttgatttgcatttccttgatgattaaggatgttgaacattttttcaggtgcttctcagccatttggtattcctcagttgagaagtctttgtttagctctgtactctatttttaaatagtgttatttgactttctggagtccatattcttgagctctttatatatactagatattagtcccctatctgatttaggattggtaaagatcctttcccaatctgttggttgccattttgtcttattgactgtgtcttttgccttacagaagctttgcaattttatgaggtcccatttgttgattcttgatcttacagcacaagccattgctgttctgttcaggaattttttcccctgtgcccatatctttgaggctttccccattttctcctctataagtttcagtgtctctggttttatgtggagttctttgatccacttagacttgatctttgtacaaggagataagaatggatcaattcgcattcttctacatgataactgccagttgtgccagcaccatttgttgaaaatgttgtcttttttccactggatggttttagctcccttgtcaaagatcaagtgagcagaggtgtgtgggttcatttctgggtcttcaattctattccattgatctacctgtctgtcgctgtaccaataccatataatttttatcacaattgctctgtagtacagcttgaggtcaagcatggtgattccaccagaggttcttttattgttgagaatagtttttgctatactaggtttttttgttattccagatgaatttgcaaattgccctttctaactcagtgaagaattgagttggaattttgatggtaattgcattgaatctgtagattgcttttgtcaagatagccatttttactatattaatcctgcaaatccatgggcatgggagatctttccatcttctgagatcttctttgatttctttcttcagagacttgaagttcttatcatacagatcttccacttcctttgttagagtcacaccacggtattttatattatttgtgactattgtgttgtttccctaatttctttctcagactgtttatcctctgtgtaaagaaaggccactgatttgtttgagttaattttatatccagctacttcactgaatctgtttatcaggtttaggagttctctggtagaatttttagggttacttatctatactatcatatcatctgcaaatagtgatattttgacttcttattttccaatttgtatccctttgatctctaattgctctggctaggacttcaagcactatattgaataggtaaggaaacagtgggcagccttacctagtctctgattttagtaggattgcttcaagtttctctccatttagtttgatgttggctactggtttgctgtatattgcttttattatgtttagatatgggccttgaattcctgatctttccaatacttttatcatgaatgggtattggattttgtcaaatatttttttagcatttaaggagatgatcatatggcttttgtctttgagtttatttatatagtggattacgttgatggatttccttatattaaaccatccctgcatccctggaatgaagcatacttgatcatgatggatgatcatgatggatgatcgttttgatgtgtgcttggattcggttagcgagaattttattgagtatttttgcataaatattcataagaaaaaattggtttgaagttctctttctttgttgggtctttgtgtggtttaggtatcagagtaattgtggcttcatagaatgaattgggtagagtaccttctgtttctattttgtggaatagtttgaggagaattggaattaggtcttctttgaagttctgatagaactctgcactaaacctatctggtcctgggctttttttggttgggagactattaatgactgcttctatttctttaggggatatgggactatttatatcattaatctgatctgatttaattttggtacctagtatctgtctagaaatttgtccatttcatccaggtttttcactttcgttgagtatagccttttgtagtaggatctggtgatgttttggatttcctcatgttctgttgttatgtctccctcttcatttctgattttgttaattaggatactgtccctgtgccctctagttagtctggctaagggtttatctatctcgttgaaccagctcctggtttggttgattctttaaatagttctttttgtttccacttggttgaaaatctaaaaaattttaacacattttagttatgtgtctgtacatgcatagctgcacatgagttcagtgccagaagagggcactagatccccaggaagtggagttacagaaggttgtgagctgctatgtgtgtgctgggaaccaaacccaggttctctgcaagggcaacccgtgctcttaaccactggggcatctctttggcctcctttgcccaaatctaatcacattgcttgtctttttaatgctggtccttgttccttgtgtgttatggatagtgaaccttaaccagatggttgttggttactatcttgatagtatcctttgatatgcaacaagctttggattttatgtaatataattaatttgtttggtggtttatggttttggtataacatataaaaatcagtgtctaatattacatgtattagtctctatattttcttctgggagttttatagtttttacccttacattgaattttgtacttactctgagctcatttaaggtgtggagacatgtggacagtctagtactgcttgtagatgaatgtgtgtttctcctttatctcttcacccagagtcatcaatccattgaccatgcactctcagtttttttccatcaatctacacattcatcatgatgctaggatgtcacggtcttgatcactatagctgtataccaggttccagaataagggagtgttaattttgtcccctttattttccctgaaaggctgttttaatgattgggagcccccttgatttctacatggattttaggatcaacttgtctactttaggggcggggagagacacagatttttgacagagattgtactgatctgcagaaccacttgaaagtattccagccttaacagtggaatctttcaaccctgggactgtgccctcttcctgacatttcaggcatctataatgcctttcaacagcagttcgtggttttcaggatactgttggttaaaatttatttctacatatttcatttttgatgtcattgtgattggaattgctttcttaatttcatttccagatgtttagtgctattgtatagaaatacaagtgatatatgcacattggctattcttgggggacttggtgtgtatgtgtctgtgtatatgtatgtgtgtatatatgtgtgcgtgtgtgtgtgagactgtgtgtatgtatgtgtatgtctgtatgtgtgtctgtgtgtgggtttgtgtgtatgtgtctctgtgtgcgtgtgtgtgtgtgtgtgtgtgtgtgtgtgtgtgtgagactgtgtgtatgtatgtgtatgtctgtatgtgtgtctgtgtgtgggtttgtgtgtgtgtctctgtgtgtgtatgtggtgtgtatgtttgtgtgtgtatgtgcatatgtgtatgtgtggtgtgggtatgtgtctatgtgtatgtatgtatgtgtgtgtgtgatcttaaggtttcctggattagcacttttcttgcttgcttctttcatagtatttcctttcctcattgctcaggctagaacctttagtgtgctttgagtggtgtttgtcttgttcaagcttgtggtccatcaccatgaaatttgatgtgtattcagtcctttgtttaactggtgtctgtggagcactgttgagccaggtgctgtgcatgattgtcggggtctccaggtgctttagtctggtggaggtgaggtcaggggtgactgagagggagtgaaatagcgcacgtaagtagtgcacaaaaatagtgcacataaatgaggaaggaaggaagcaagcttaagggcatggcaataagggttgaaaatagagtgggtgaagtagggacgctgagaatgtccccaaggaggcaagagtgacagaggcctcctcaatgccacagtcaaggtcctgcaaagagtctaacaagctatgggaggaacaagggaaactggcccccgaggctggattcagcttgttctaagactgagaaggtggtggtaggaactgagggggttgaagggccagggagaggcacaaaggaaggctaagtctccctggacctaatgcttcctcttcaagataaaaatgttaagtcttgtagcacaagcctttaatcccagcactcgggaggcagaggcaggcggatttctgagttcttggccagcctggtctacaaagtgagttccaggacagccagagctacacagagaaaccctgtctggaaaaaaaaccaaaaacaaaaaacaaaaaaaaagttaagccttcaactctggttgtttctgtctccatagtactgttatactttggatattatatcctaaagaatgtatccagtttaacactgttttacacaagtgtatttcaaggagctataatcaacttccatgtggcgtcctttgtcttgctgtatagccttggctggcctggaactcattatgtatccctggctggccttgaactcacagatctggggtctctgtctcaagagtgctgggattaaaggctgtattgccacagctcagtattcttattttaaaaaatgtgtcttggaaatgtgtgcagaagttcctaatgtaacgactgtttttcctgtccctctcttcttccatgaggcagcacctctttattagtttcttagtgatgccatagggaatattattttatattcatttgtccttggttcaaacttttcatctttcttaatagaatatctagactgttttaattgaaacaaataacttgaaaattttcaaattctaacaatttgactcgactcactgtacaatattcattacatgtctgcattcccagtacattttttttacatttaaattttattttatgttttacatgtatgggagttttgcctgcaaatatgttatgtgccaagtttatgtttggtgcctgtggaggcagaagacagcatcatattccctggaactggagttgtagatggttgtgagccatgtggggactgggaagtgaacctgggttctttggataagcaaccagtactcaaaaccactgagccactcctccaggatccaatatgtgtgtgtgtgtgtgtgtatacatatatatatatatgtatgtatgtatatatgtgtgtgtgtgtgtgtatatatatatatatatacatatatacatatatatatgtatatatatactttaaaaagttgattcattttatgtgtacaaatgttttgcctgggtgtgaggacactgctggtaaccccagctcttgagaggctgaggtagagggatcatgagtttgagtcaggtacatagagagtacaaggccagcctgactacaaagacttgtcgcaagcagcaagcaagcaagcaagcaagcaaggactcgtgatgtagctcaatggtagaatccttgcttttttcttaaagatatttttgaaaaggccaggtgtgttggtccacacctttaatctttgcgagtttgaggccagcctagtctacagctagttctacatagggagaccttatctctctctctctctctctctctctctctctctctctctctctctcacacacacacacacacacacacacacacacacacacacacacacacacacacacaaaggacggaagaaagaagaaagacgaaaaggtaataaaattggtaggtctttgtgaaaacactaagtaactctttttagtccccccatggggactgaggaggtcactcaacaccagaattctataaaccttggcagagaagacaatgaaagatgatgctgactttccttcctaagggacctcagccacatttttcttaatcatattgataaatagaccagccactttcagggcctttcactcacccctgaggcagaaccttgagcaggaaatatgggggagaagctgtgaagttcagggcaggatattcttgacttgtgcttcaagtttacctctagactgtcaggagacatgtgcagaggaagggggcctctgggcaggatgcttcttcctactatggaatcactagctgctgttcctgcttgtcctcagcctctggcctggacccaccaaccttggtggaattgaattgggttaaacagaggaggagctgggagaaagtgggaagagaggaaagcttcaggcgaggccatgtgatgttgttggaagagtcacagggtcttctggctcaaatgtgcaaggaggaagaggtcagagcagccaggaagacatcctgtggtctgtgctatcatgttatcacctatgcaacatcactgtgctcatctaaggtggggacacaggatgcatcaggcttagaagagcagcagggggcagcagtcaagcatgtgtctccaacacaaggtccttgccaccaagcctgctaacctgagctcagtccttaaactcgacatggtgggaggagagcgccaacttctgcaaggtgtcctctgatcttcacatgtgtgaaatggtgcacacatgtccacacacaaacacatgcatacacatacccactctcatacatacaaatacatacatataccacacacacacacacacacaaaatgtaataagcaatttctaattgaaaaaaaatctgtttatacactgttgctttctggtcgtcaccagcatcattgactttgcttctttaatcgtatcactttactaaaaattctgttttcagatttctttatattttttccttaatcaatctctattggattcataatttagatagaggaagtgatggaaactatttctgccttgttcattctttttacaaacaacatcgctttgtggggttagtcacaggcccgcactctttactaatcaacaccaaaataaataggcccttaaaactgtcagtggtatgggccagttgtgaagctggggcacggaggggctgagccagatggccaggccaggctcctaagacacaatgtgtgttctgtagctcttggctacagcaccctgggcagctgagtgctgtcagaaagcttcatgtggaagggaacagattgcccactctctatttgttctgtgggcatctccaggaataaactgtaggatggtacaagggttttctgaccctgactgaacctactggagaccggcaaaaacacaggctgggagttctgtaacccctggctggtcactgccacatcctgtgactgtgttctagtccagaaacttcctttcaggctctctgcctggtgtgtaaagtacaggggcaagtctgttcacttctctgaacttgccagtgatgtagctagcaggtgctgtctcacaaacatgggttcatgttgcatggaggttatgtgttcaacttgcataggctggtagaccagatggagcttccctcctgctccaccaggtgttaacccaccactgcgtagggtgtgagagagagagagagagagagagagagagagagagaaatggcatccactaccaagtatgattcagtggttcattgaacccctggtagggcctctaagagtggctagaatgtgtagagtgtgatgtcctgagcgcctgagatactgtcttagtcagaatttctatcactgtgatgagacctcatgaccaaaaagcaatttggggaggaaagggtttatttggcttacacagacacatcatagtccattattgaagggaatcagaacaggaattcaaacaggacaggaacctggaagcaggggctgatgcagaggtcatggaggggtaccgcttgctgacttgctctcatgacttgctcagcctactttcttatagaacccaggaccaccagcccagtgatagtaccactcacagtgggctgggccctttccccatcaatcactaagaaagtgccttaaaggcttatccacagcctcatcttatgaaggcattttctcagttgaggttccgtcctcttagattactttagcttgtgccaagttgacataaaactagctagcatagacatagtcagtatgctgcatgggcgtgtgagaggggaaagaagagcctctgaccttagagccatcgtcttctccatcacaggacgaggtagttagatttggttttctttttctcttttaaactaatgagagtgtattgcagccatcttctaggtctttagaggaaagactaaagatttctgccactcatctcattgaaagcaagacgctccctggggtttggagacctttgccatcaaaggggcaaatcctcaatggtcaagtgcaaactttggaggggggtgtttttacaagaggatttgttttgatgaagaagagacagccacacaaaacagattgagcagtagccccaatggactttgatagatcacagctataccttttctatttacaccttctctctgggcgttaacaatgagttttggatggacttgtagacttttcttgtggttaaatagctgccctttctttgatttgcatttgtaccccacgacagcccatcccatacactgtggggtgaccccagagttctctgctggagtgaaacaagcttggcacttgcctgtttactgcatctcaacacattagagctccctggcttcaaatagtgtttgaacagaccaaaaacacatttttggctgtcatccagagtttggcttctgcttcccaataaatgccataaaaacgttctgtccaataaattctcaggaactaaaaagaacaaatctcctgttttgtatgatcggagagaatggagacaggtttcagctgaccccctggcgtgctgcccgtggcacaggaaaaccgaatcgcacagtatctcttggcagtgctttcaagtgatcagagataattctctgcacgtgacagatgagccctccacatgagttttgcatgtttatatccactggtgcctttggggtccatgaaatattacctttatatccttctcaattgtatattagtatatgttataaagtgtttgagccttggctcaattttttgtttattaagcttgtagtgctagcaatgggaagaattcctctttgtgtgtatgaacatgtttgtatgtgtgtgcccatgtgtttatgcatgtgtgtatatgtgagtgcagaggggcttttccctagaaatgataaaatccctcccattccgaggtgcgtccagaaagagatggcatattcaaattagagtattcaatcagggtatattagaaagggttcatttgcaaaggtgactttatttcagaagatgtgaatgtgagcaggggcagaaagcgtagtggagaggaacagcagagcggttaccacccctagaccagtaaggggggatggaagggataagatgacctagaaggcagaggcacgtggggatgcagccttcaaagtggccgtcagtacagacacataggtgtccaggctgaagcaactccaccccagggctgctctttctctcccatctctcttctctctgctgagtgattccccactgactgagctcaattcaagccagagttagatcaacaggatctttgttttggcttccagagacagaacatgaacctaggaaggtgcctagaaggtctctgggacatccccactgtgtgcccagttagtgctgagagaggagtctctacagaagtagacttttattgtaaacagcttcattgacatgactaacacgtaataaactgcacagactctaagcatggaagtcgatccactttgatgtgtaactgtacctgtgagaccatggtagtgagtttatcatactttagcatttaaggcagcccatgggcttcttctgcagtcattgcatcattgcatcatgggcacaccctccccccacgtagataagattaaaaaataatgaaaattaaagaaaactgagccaaatgcaagtctgtgagtctatgtggtttgactagtcagcaatttaagtttgagaaaatcagtgctaaccgtgcatttagttagttccagtggaactgtagatttgaagttccagtgtgcactgtatttgatagtcatatacaaaacacatactgggaagtggctcaagagggtgagagatctctggaaggctgtggtctccgaggaagcagagcattgggagggaggaagatgatggtgaagcttggtggctagcttgatatactggagaagagggaacctcagccgactcattgcctccactggcctgtggggccattttcttaattgctaattggtgtagcattggtccttctgtggacagtgccatccttagacaggtggccctagacctctgtaagaaaggtagctgaacaagcctgagaaagcagccaggaagtggtgtttgtctgtggcctctgcttccgttcctgcctcagcaccactccgggacagactatagtcagtctgtgagcaaaataaactcccaagcaccagtcagtggaatgctttttagaaaaggccagtgtcttttcagattatggtttatgcaaagttgagtaagaaacacaagccaccagtttcgtcgtactgttaaataagactttccaaaaaactaccaagtcctcaaagaatagagatgtttcttctaacagatttcaacttttacatgcagtggttttggaatcctttcctttgataaaataaattattggttcctggtgtagtatttgataaatatttgttgaaaatattggtttattgaaatggttttattcatacgttcaaattcgatttgtatcactgaggaatcggcttttcagaatacgcctaagcatccagacccgcagatctgtcccgtgacttaggcggctactttattttctccttcgtgctatatcacgggcactaatccccagttttgtgtttatctctttaagatccatttgggcttacagcattacctcatcatgacctgtcagcccagctgtgttcccctagacgaaaaactcctgccccagcttttaaaggaagcaggctatgctacgcacatggtcgggaaatggcacctggggatgtaccggaaagaatgtctgccgacacgccgaggattcgatacctacttcggtaatggacatgcacacatttctttaacaacacagatctactacagccagctcataaaataacacccaagtatcatcaaacaaaatgaccagaaacctgaacacagtaaatcaggcagcaccatagtggagctgctttcggctgttatccccataagccagctctgtgctgagcgtactctgggcatgcgcgcccacagcaagacgggggggggggggggggggcttagccagagcgctaaggaagagtgttagggacatttatgtcagagaccactgtgcgctctagaatgttcttacctatattgaagttcacatattttccccctatggactgtgttctccaggggaagactagctcaccttacctgggcatcttctcccacctaggagctctgcttccaaaattactaggttggagaagatcgatttaaaaaaattaataacaacaacagaaaaaatggtacaaggaactaaccaaacaataacaagagaaccctctgaaataaatatgaaacctgaagtttgttttaaaacatgacactttaagcctattgtaaactctgccttaatttagttaggttattctaattaaggcagagtttacaataggcttaaagtgccactaactgtgtatctttctgttagggtctttttctattgagctatatttctgcccagctacttagtaaccttcctcctgccatctgcttcttccaaactgaatgcgtacttaacataaagcatctaaatagaataacacaattggagcaaccagtaagacatgctataatttaaatgcactatagatgcatggctctgggagcactccacatctaagatgggagacttcttatgttggaaaggaagagggagggagggagggaggaggaggagggaggaggagggagggaagaatatgcaggagtgtgtatcacaagggtacagtaggtattagggaagagcaaagcttcttccagttcgcagcagtcagaggaacttcccctttgggagaaggtaaaggggtgggggtgggggtagggtctcggtgcttaactctaataaaaaagtgatggctttcttgtagattgtttttaggaatctgtttccaagcaaggtaaggccaaattcagtgcaaaggagcggatctgcatctgccctgaacccatgcggccaagcacttagccctaaagctgaggtcaagatgcaaagaagtcagccaggagagcatgtgtgtccctctccacccgtggcattgcagcaccactggccagccgtgacattatttctagctgagtctaaataagtcttcagtgtccttgaatggctgttagaaatcagccttcactgattaacatcttcgaagatctagaggaatggcctgtgccttgggaacttttttcatgcaggatgaattgatatctgtcctctgatagactgtggatatttagaatctttattaaaatccaagttgcatgcttagcagcctaggtggttggacaggggggcaagagctcactcagtacagtagttgcagcagtgaccttgatttgatccctagaacctgagtaaaaaaagctgggtatcatctaagctttgagtccaggctccaggctcaaggacagtggaggtgggggcatccctggggctcactgtccaggcagcttagcctaaatgccaaaccaggagagaacatgtctccaaaaacaatgggaatagctcctggcaatgatgtcagggttgtcctttgaccaatgcacatgtgcacacacacacacacacacacacacacactaaaaactttacataaagggcagaagtcatattcttgtatgagaattaaggttcaccctggacctggatagacaaatacccacatttgttatttgtctatactggtttggccaagtatttgagttctagctctacagttcttctatttttaatatcatttaatatttatggttcctataaccaaacatatcctgtgcctatatcttccccagtgatagtttatattaatggaaaggagtgtgaagtgttctctccaaattctaatactaagtagatgttaaaaacccaaactactggcttgatcactctaatcaccaaggtaaggttgaggtagttatttgtgtgtgtgtgtgtgtgtgtgtgtgtgcgcgcgcgcgcgcgtgcgtgcgcgtgcgtgtgcgtgagagagagagagagagagagagggggagggagagagagagaacacaaacgtgtagaggtctgagtcaggacagctttcaggagtccgttctcttcttcctctgtgtggatcgcagggatcagactaaggttgttaggtttggtggcaagcacctttcctcattgagccatctcaccagccctgaaattattttttttgtgaatacaattttttctattccatattaagtagtaaatatgttggatttatttcctataaatatagataaaatcacacaataagttatgttgatgtcatatactaattatattcaggaccttgaacttatttgatcatgaaaaatagttaatctaaaatcaattgaattattacataagctgtataagactctttaattgtcactgtatacaaaattcatgagaaaggaaagagctaggcccatttttcatcattttaagactaaaagggaatatatttaagaatatagctaagagctcatcaaagtttatttctttttaatagctttattagggtataattcatatactatacagtttacccaattaacgtatttaatttagcgatttttaaacaatgtgagagattgtgccattatcaccacaattcagttgtaggaaaccacacacacacacacacacacacacacacacacacatgtatgtcacaaaaagaaaccaaatcccatgagcagtcatcacgggcctccaggcaaccagagccctgggccatccgtcactaaccactttctgccctctgttgattggccttttctgagcaagtctgtcaatttaatcataatatgcagcccagcttattttcacattttcaaaacacgatcacttgcagaacaacgattagttggggcgtttctgtttctcctgtgctttcctctttgttatgggatctgggctctagaaacaggggagttgacaggccactgggctcagtaagcactgcatctctgagcagcggggcaaggttcacagtctagacagaatgctgctctttgatctctggggctgctcagctgggatagagagcttgtattaggaaaggtttatatttttccaccagtgggtgtcagcatttgactaaatataactccggcaaaggccccgtccataaataaccacagaaatccatctcccaacctcagtagcaacaaatgacacgatctgaaccctgtttttagtattttacaagtaaaaccttgtaacacattagtggtgcgttatcttttttcttaggcaattttaaagaattagcatctggttgcttcctgaacttaaactctgatttctaaaaaccttttcccacagatcaaccatgtataaagagttgacaagcgagaacagatgctctaaaagactcaagtgaggaagggccttggatttccatgtagtgccatttcagtggtgtctctaacaaatatagagatgttaagaagagaaccctgattagccctgtcatttgattagcctcgtcatgggcaatcagttgcattaggcaattaactgctggaacattcgtttgcctaacaagctttctgccatgccgactgtttcttctcccattcttcttgcaggatacctcctaggcagtgaagactattacacccacgaggcctgtgcgccgattgagtctttgaatggtacccgctgtgcgcttgacttaagagatggtgaagaacctgcaaaagagtataacaatatttactcaacaaacatatttaccaaaagggctacaaccgtcatagctaaccacccaccggagaaagtaaggcttcctcctttaatattgtcaaaatcttgttgcttccaagggagtgtgtgtgtgtgtgtgtgtgtgtgtgtgtgtgtgtaatataacattttagagcatgttccagttagccagaaagggaaggttgttagaagtgaagaatttggatcttcctcaggtctgggagaaagtacttaggaacgcccaagagatgagtctcacaggaagggaccctgggctgcagatggaggaaggctgtctgtccttcagcatttcagtggaaaccctgctcactcttatgatgctttatgtgtgtgcacagtaagtggttagcaaaatcaggcttcaggattccagacaggtgtctgtgctcgaggcagggctccgttgggaagaagtgttgggaactcaggggctagagaaaatcctctcattctatatttttctcttcaggattattttggttagtcttaatcttttgtatccccatgctaattttagagtaggttgaccaatttttactaagaaaacagaagttggctgtttgattggttggtattcactgaccaacttaatggaaatgaccgtcttagcaatactgggtttttacaattaatatgcatggtatattggtttttacagacaccataggcgcctatcaggtatgtcacgtgcagacttagctgcaggtaggaagagagaagagttgtgagaagtcttaaatgcaaattgtctggattcagcacataggtgctttgggaacagagcagatttttgtgttgtgagacactgggctcaaagcgtgtccttatgaagaattgtattagcacactcacaaaaattggccttcagtgggacatggaaaatttgagaaagtgtccaggtccttccagttctctgcactttgtctctttgacgatgcgtgaaccctcagcaggcagggttctggcttgtgtatctgttcagacttagtgacctgctaatgactctgtctgctacggaatcttccaagctctgtcttctatactctcagtcagtatgagggattctccctggtggctgttctcagttttgccatactttaggtacttaagagctgacatcgtcacctgacatctctaggtaactatgtctgccatgaaacatgaagaaaggggagcattctctcaaatgtttagaaacctgcacattttaagtctagatttaaaaccagaatggttggtgggctaggaaggtggcttcatataacattaaatggataagaagatgcaactggggtgaaatagttctgtggggagggggagttataagctgggggctgtggggaaaggcttgaaaccaaggacaacaggaggccctaagagcccgtgcaccacaaagaggtattgttagcaatggtgcctcttgctggctgtattatagctcttaattgtatgtgaggcattttatggatatggcctaataccaagaaagccaaagtaaggctttcagggaactctttattatcctttgatagaaggatagaagacacgctgtttgtttaagcaaacaggcttggagaaatgaagtgacttgttcaaagccacgggactgtgtgaagtcagagtcaggatgtaacctctcactttggactccaagagcatctgcctttattcgccatccctagtcacagctcgtgcagagatgttgaatcccagttcatattcagctccacagtcccggtcttgacagcatattaggacctcctgggacatttggaagaaatagtgatatcagatattgtaaggcattaatatttcatccccttatcagtgattctccgtggtgtccatggtgccgctatggagatcctgtgcactcaggatggttccgtgagtgttagcttgatgctctcacaagtacaaagacaagcagatgccagcttgctggtattacgggctcacaatctgatctaatcatgcaactctatgcagcagagataagctgtgcacaatacaaagttattcttactgcctggagatgctcagcacacacaagtcttaatgagcgttctgcttgtctacgtgttcagacacagtgacctgccagtgactccttgtctgtttagaaccttccaggctccatctttgctattttactcagtttgaggaatcttccctagtgactgttctcatctcccctggtgactggtctcggctttgccacactttggatttttaagggtgtaatgctgacatctctaggcaactatgtctgccatgaaccatgaagaaggggagcaatctctcagatatttagggatgtgtacaaaacagtattgtctcctggtgccctcataccaccaagcagctaccaggaagcgtctgtggagaagtggttccttgtgggtgggcagttaaactgggctggtggagaaggcaccagaaccgaggacagtcacaggccttaagagctcacatcccatgagaggggtgctgttaacatggcactgctcatagatagcgttaccaaaatcaccagatgggagatggacatttcctgccagcgcgtgggatgctctgaagaggtaatcagcatgctcagagcccccaagcacagactaaagtaaaagaaagaatagtcatgtagcaacccagccgtttccacaaggcagctcctgcacacagatgctcccggcttcagctctccagacagtgatgcgactcactggcttcaggagctgcatctttgtaacatctttccccaggatttaacctaattctgtgctaggctctcaggtgcctagagcatcatgtgtagattgtaacatgacatttgttctaagatggaagtcattcaaagaattcacaggaagtgttcaccaaccaactaacgtgtacttgcttttaaggggcagctgagggagaaaatcgacagagctgccgtgtaacagttgagctgttgattctggggacgctgctaatggctttacatgtgtcaggaagggacatcctttctcctttatgtgagggtgactcacatagtagtagcactataaaaagaaagtcatatattcatagcatgactttctgttaaaattagaacagcagcactttgaagaacttaaaaaaacaaagaaccctctacatctaatctactagaagcttcctaaggaaaacaaaacaataaatcctagtggaagactttctttgtgtgagtacaagctgggaagaaatgtcttaatttggttgtcaaagatagaatagtagtttaaaaatgtattcctgtttttccaatttatactttgatttagggagccctctaaagacataaaaatgagtgatatgtggtttcttcccatagtgcggatgtttagagttcagatcttaggagccatggagcagaacagaaaagggaaaagatccattagcatcctcaatgtacgtatgcagagttaagtctgggttttatgtgatactatagtgtctagacacgctttccaaaccaggattccattttatagtcttaggatacttgaaagggtcacagttagggttggggtacagttggcagctatgactgagctgatcggaataagagtttgaaatcaagaaaataccaaggacataccaggttctaagaaacagaaatcaaagctgggtagtggtggtgcacgcctttaatcccagcacttgggaggcagaggcaggcggatttctgagttcgaggccagcctggtctacagagtgagttccaggacagccagggctacacagagaaaaaccctgtctcaaaaacaaaacaaaacaaaacaaaacaaaacaaaacaaaacaaaacaaaacaaacaaaacaaaacaaccagaaatcagtggaggttaatgtggggcaggacttcagtgtgaatcaggagtcagtgaggtgagaaggggtctctctccaaggccaaggacctcatgtccatagatacacatacaatccccagatgaaggctgtttgctttggccagtggggagaaactggctacagcttttctctgggaggaccccaccaactagtgactgcaggtatggtcctgatggtggttggagaaccttctagccttagataatcattcttttcatgaggctaccatgcagcacagactaccagtctcccctccctccatcatttaaaattagtacagtggggctggagacatggctgactgattaaggacactggctgctcttgcagaagacctggttcagttcccagcgcccacatggtagctcacaactgtttgtaactccagttccaggggagctgatgccctcttctgacctctctgggtactgcatgcacatggtgcacagacatatatgcaggcaaaacactcatatatatgctatcgtaatgcttctacttggtgaggttggagaatgggttgtccatggatgaaattcaccttctgagtgctaaagacttgatttatagtagtgatataaatatacaaaatggctgaatgtggtatcacacacctttaacccaagcactgggaaggcagaggtaggtggatctctgtgagttctaggccagccaggccacatagagagaccctgtctcaaacaataaaacaaagtgggtgtcggagagcatattaaatgtgtttgattggtcctaacctcatgaaatggattggacacagctcttggtgacccagagctacgcaatatatggaattgttcaccccacagcaaagtgctctggactgctcaaatgaactggaagaaaagacaactttgccgggctgtggtggcgcatgtctttaatcccagcactcaggaggcagaggcaggcagatttctgagttcgaggccagcctggtctacagagtgagttccaggacagccaggactacacagagaaaccctgtctcgaaaaaacaaaacaaaacaaaaaagacaactttttgttgttgtctttcaaagaacacttgcatctcttcttgtgaattatgacgttatgatcaggtcagcaaacagtgtgaggctctcacatatgacagtcacctgactggccagcttcaacttgatccagagggaccccagagtgtcaaatggccagtctgggtagcgtggaaagtgtgtgtgtgtgtgtgtgtgtgtgtgtgtgtgtgtgtgtgtgtgtgtgtgtgtgtggaggagcagaggcagggtcagaagtgttgatatagactttaagaggaggaacttgaaatacttttcatggaaaaagtgtacatttaattttaacatttaattcaaaatgtctgaactccagataaacgtaagagtatctcttagagctccctgtctggacagtccccactcttatcatatcttttcattccccgtaactggttggcacacactccagcaaagggttgtgtaatttagaacaatttgcaacaataaaaagtgaagtgagtttcttccttctgtcttttttccttcatttatgatttaaatacctcacataaatgtgcttattcttggatcaaagctattgattattgtctctttgagggtattaaacatatgagaaattctatacggcatggtgcagggctatctgcagagaggcccctaaggagaagggctgacctggaataccacaagtgctgactgttctaagctggcatagagaaaaaccagaacctgtggctcacacttcttatttctaggaattaaattggcatcacatttatttggttcaatatcaaaatctaacaaaacactgtttccccagaaaacatgttaaagaaaaccctgtacactctctttatttttagctcacttatctgttggtgcatggcaacattgtaacacggagggtaccaggagggaagcctgcatcaaacagtggcacctgggcatacctaaccttttaaagccttggttaactcatttgaaaaatggatataacaggatggttttgagtgttaaatgagatagagtagtcagattattatcagagggttttcttttttttttttccattttttattaggtatttagctcatttacatttccaatgctataccaaaagtcccccatatccacccacccccactcccctgcccacccactccccctttttggccctggtgttcccctgtactggggcatataaagtttgcaagtccaatgggcctctctttgcagtgatggccgactaggccatcttttgatatatatgcagctagagtcaagagctccggggtactggttagttcataatgttgttccacctatagggttgcagatccctttagctccttggctactttctctagctcctccattgggagccctatgatccatccattagctgactgtgagcatccacttctgtgtttgctaggccccggcatagtctcacaagagacagctacatctgggtcctttcaataaaatcttgctagtgtatgcaatggtgtcagcgtttggatgctgattatggggtggatccctggatatggcagtctctacatggtccatcctttcatctcagctccaaactttgtctctgtaactccttccatgggtgttttgttcccaaatctaaggaggggcatagtgtccacacttcagtcttcattcttcttgagtttcatgtgtttagcaaattatatcttatatcttgggaatcctaggtttggggctaatatccacttatcagtgagtacatattgtgtgagtttctttgtgaatgtgttacctcactcaggatgatgccctccaggtccatccatttggctaggaatttcataaattcattctttttaatagctgagtagtactccattgagtagatgtaccacattttctgtatccattcctctgttgaggagcatctaggttctttccagcttctggctattataaataaggctgctatgaacatagtggagcatgggtccttcttaccagttggggcatcttctggatatatgcccaggagaggtattgctggatcctccggtagtactatgtccagttttctgaggaaccgccagactgatttccagagtggttgtacaagcctgcactcccaccaacaatggaggagtgttcctctttctccacatccacgccagcatctgctgtcacctgaatttttgatcttagccattctgactggtgtgaggtggaatctcagggttgttttaatttgcatttccctgatgattaaggatgttgaacattttttcaggtgcttctctgccattcggtattcctcaggtgagaattctttgttcagttctgagccccattttttaatggggttatttgattttctgaagtccaccttcttgagttctttatatatgttggatattagtcccctatctgatttaggataggtaaagatcctttcccaatctgttggtggtctttttgtcttattgacggtgtcttttgccttgcagaaactttggagtttcattaggtcccatttgtcaattctcgatcttacagcacaagccattgctgttctgttcaggaatttttcccctgtgcccatatcttcaaggcttttccccactttctcctctataagtttcagtgtctctggttttatgtgaagttccttgatccacttagatttgaccttagtacaaggagataagtatggatcaattcgcattcttctacacgataacaaccagttgtgccagcaccaattgttgaaaatgctgtctttcttccactggatagttttagctcccttgtcgaagatcaagtgaccataggtgtgtgggttcatttctgggtcttcaattctattccattggtctacttgtctgtctctataccagtaccatgcagtttttatcacaattgctctgtagtaaagctttaggtctggcatggtgattccgccagaagttcttttatccttgagaagactttttgctatcctaggttttttgttattccagacaaatttgcaaattgctccttccaattcgttgaagaattgagttggaattttgatggggattgcattgaatctgtagattgcttttggcaagatagccatttttacaatgttgatcctgccaatccatgagcatgggagatctttccatcttctgaaatcttctttaatttctttcttcagagatttgaagtttttatcatacagatctttcacttccttagttagagtcacgccaagatattttatattatttgtgactattgagaagggtgttgtttccctaatttctttctcagcctgtttattctttgtatagagaaaggccattgatttgtttgagtttattttatatccagctacttcaccgaagctgtttatcaggtttaggagttctctggtagaatttttagggtcacttatatatactatcatatcatctgcaaaaagtgatattttgacttcctcttttccaatttgtatccccttgatctccttttgttgtcgaattgctctggctaatacttcaagtactatgttgaaaaggtagggagaaagtgggcagccttgtctagtccctgattttagtgggattgcttccagcttctctccatttactttgatgttggctactggtttgctgtagattgcttttatcatgtttaggtatgggccttgaattcctgatctttccaaaacttttatcatgaatgggtgttggatcttgtcaaatgctttttctgcatctaacgagatgatcatgtggtttttgtctttgagtttgtttatataatggattacattgatggattttcgtatattaaaccatccccgcatccctggaataaaacctacttggtcaggatggatgattgctttaatgtgttcttggattcggttagcgagaattttattgaggatttttgcatcgatattcataagagaaattggtctgaagttctctatctttgttgggtctttctgtggtttaggaatcagagtaatagtggcttcataaaatgagttgggtagagtaccttctacttctattttgtgaaatagtttgtgcagaactggaattagatcttctttgaaggtctgatagaactctgcactaaacccatctggtcctgggctttttttggttgggagactattaataactgcttctatttctttaggtgatatgggactgtttagatgatcaacttgatcctgattcaactttggtacctggtatctgtctagaaatttgtccatttcgtccaggttttccagttttgttgagtatagccttttgtagaaggatctgatggtgttttggatttcttcaggatctgttgttatgtctcccttttcatttatgattttgttaattaggattttgtccctgtgccctttagtgagtctagctaagggtttatctatcttgttgattttctcaaagaaccaactcctcgtttggttaattctttgaatagttcttcttgtttccacttggttgatttcacccctgagtttgattatttcctgccgtctactcctcttgggtgaatttgcttcctttttttctagggcttttagatgtgttgtcaagctgctagtatgtgctgtctcccgtttcttcttggaggcactcagagctatgagtttccctcttagaaatgctttcattgtgtcccataggtttgggtacgttgtggcttcattttcattaaactctaaaaagtctttaatttctttctttattccttccttgaccaaggtatcattgagaagagtgttattcagtttccacgtgaatgttggctttccattatttatgttgtaattgaagatcagtcttaggccatggtggtctgacaggatacatgggacaatttctatatttttgtatctattgaggcctgttttgtgaccaattatatggtcaattttggagaaggtcccgtgaggtgctgagaagaaggtatatccttttgttttaggataaaatgttctgtagatatctgtcaggtccatttgtttcataacttctgttagtttcactgtgtccctgtttagtttctgtttccacgatctgtcctttgaagaaagtggtgtgttgaagtctcccactattattgtgtgaggtgcaatgtatgctttgagctttactaaagtgtctctaacgaatgtggctgcccttgcatttggtgcatagatattcagaattgagagttcctcttggaggattttacctttgatgagtatgaagtgttcctccttgtcttttttgataactttgggttggaagtcgattttatccgatattaaaatggctactccagcttgtttcttcagtccatttgcttggaaaattgttttccagcctttcactctgaggtagtgtctgtctttttccctgagatgggtttcctgtaagcagcagaatgttgtgtcctgtttgtgtagccagtctgtaagtctatgtctttttattggggaattgagtccattgatattaagagatattaaggaaaagtaattgttgcttccttttatttttgttgttagagttggcattctgttcttgtggctgtcttctttttggtttgttgaatgattactttcttggttgttctagggcgtgatttccgtccttgtattgcttcttttctgttattatcctttgaagggctggattcgtggaaagatattgtgtgaatttggttttgtcgtggaatactttggtttctccatctatggtaattgagagtttggccgggtatagtagcctgggctggcatttgtgttctcttagtgtctgtataacatctgtccaggctcttctggctttcatagtctctggtgaaaagtttggtgtaattctgataggccttcctttatatgttacttgacctttctcccttactgcttttaatattctatctttatttagtgcatttgttgttctgattattatgtgtcgggaggaatttcttttctggtccagtctatttggagttctgtaggcttcttgtatgatcatgggcatctctttttttatgtttgggaagttttcttctattattttgttgaagatattagctggccctttaagttgaaaaatcttcattctcatcaattcctattatccgtaggtttggtcttctcattgtgtcctgcattacctggatgttttgagttaggatccttttgcattttgtattttctttgactgttgtgtcgatgttctctatggaatcttctgcacctgagattctctcttccatttcttgtattctgttgctgatgctcgcatctatggttccagatctctttcctagggtttctatctccagcgttgcctcgctttgggttttctttattgtgtctacttccccttttatttctaatatggttttgttcatttccatcacctgtttggatgtgttttcctgtttttctttaatgatttctacctgtttggctgtgttttcctgcttttctgtaagggcctgtaactctttagcagtgctctcctgtaattctttaagtgacttatgaaagtccttcttgatgtcctctatcatcatcatgagaaatgtttttaaatctgggtctagattttcggttgtgttggggtgcccaggactaggtggggtgggagtgctgcgttctgatgatggtgagtggtcttgatttctgttagtaggattcttatgtttgcctttcgccatctggtaatctctgaagctagctgttttagttgtcactgttaagagcttgttcttcaggtgtctctgttagcctctataagcagacctggagggtagcactctccttagtttcagtgggcagagtattttctgcaggcaagctttcttcttgcagggcaggtacccagatatctggtgttcaaaccagactcctggcagaagttgtgttccactcactagaggtcttaggatctcgtgtggaatcctgtgtgggcccttgcgggtgttgggcaagactctgctggcaaggtagcccggggctcgagtggggtggaaggggtttgtgccccagatcaagcccgggtagcctgcttccctatgtaccgcagtctcaggttccgtgcgattggattggggcaggcgctgtgttccactcaccagaggtcttaggatcccgtggggagtcccgtgtgggcccttgcgggtgttgggcaagactctgctggcaaggttgctcggggctcgagtcgagcggaagggacttgtgccccagatcaggcccgggtagcctgcttccctatcgagggttttcaatataaacgtttcaatatgtggtgggtcaaagccttctgccccattctaggactttgaccttcatgttttgttttgggtcttgtcatcttttgaacatatttactgagacataatttgcatatcataaaatccactcacttaaagtattcaattaactggaaatttaagaggcatctgatcatcaccatgatctagttttaaaacttctcaccactcttgaaagaaatttctacctagtagtagtcccttgtcatccttttccccagaattccccaaaggcacagatatccactcacctccttcctgtctccatggacttgcctctttggacttcagaatgttttaatcaatgcaacaatgcaaaatgtggtctctggctcctttctcttcacgattctaaaggccagctgtgttgtcactgattatttagttggtatatactgtgattaaaaaatattctgaattttatttttgcatccatcaactatgagcattgaggctaattcttggccattatgaacaatgttgcagtgagcatcccatgagcgccctgtgcatttcagaccggcatgtgctttcctggtgttctaggtgtgggagggccttgctgtatggtagctgtgtgtgatactaaggaacttcatgctgatttttcagtgcctgtctatattactttgcattcctactaactaatttctccatagcttcgtcaacatttttgctttctattttaaggactctaagcatcctaatgagtgcgatgcggtgatatcttactgtagtttttgtttgcagtcccctgtgtgtgaatatttgttacaaatcatctttggagaaatgcctatttaaattctctgtaccttttattgttgaattatttatatactctggctacgagctccttatcatacataggattcagagatagttaggtccactctgtagattgtcttcacagctattgatatgaactgagaatctcggctgtctcatgtgctgtgtttaaagcttccgttccttttaaccgacatttggttttcaaattctctttgcagccactgttcctctaccttgctttccagtctgtccacgatcccctgcaggtccctgaggagtacatggagccatatggcttcatccaagataagcacagacgtatttatgcagggatggtgtccctcatggatgaagcagtggggaacgtcaccaaagccttgaaaagccacgggctctggaacaacacggtcttcatcttctccacaggtcagttcaccagttcgggaaatccgtctctggtaaaccctaggatgtgtcattcagtaggtagaatgaagacagactggagaagtttagcatttgccccggaaataaatgccaagtgctgtagtggagcctcggtcacagtgtgaacaaggaaggagagctgcaaacctttcctccttttgtttgtattttataacacaccgggagtgtacctggagacctggactcactaactgagtgagttagcaggcaccacatatccacagggcaccaggatggcagctcctcaggtgctggtcaccacagccctctgctgtggctgcatgactgctgctaactaaagtctgtgtcctggcagagacaggttggggcactgtaaagccagattaggaaaggagcaaactaagcttagtctagagtctccaggtgtaagctttttttttttttttttggcattaaaattgttttctgatgacacacattcaatagaaaaagtaagagagaggaaaaaaaaacagtgaaagaaaaataaaaccctctgtggccagagatggttggagatcaccttcacgtagtcaggctaccagagatgagtcttctaacattcttagtttcttgttctgttttccttacatttcttttattgcttggaaaatttacttaccagtctttcctaaactttgtgttgaattcatctcaatcactgtttttataagtcactgagagctcttagttcctgataactcctttttttttttttgctttatagatgtaaaaagtttgatgtgagttcgaggtcagcctgggctatacagagaaaccctgtctcggacccccacacccccaaaaaagtttgatgtgtgtgaatgtacttgatatatgtaggatacatatatctgtatatatccttaaagtttgctgtgttgacaatattatctaagtttttccctagtatctttgtatttttgcttacgtcagtatttcaaaacctcagctaacaccaacctggcagtctcatgcgagaaatcagagctattgttcagcaagttttactgaaatgtcacagtgtaggggtgaggccacatggagaggagtcatcttgctggtctcatggttggttttggtgtcctgttgttttgctttgcttttaattaagtatagctatcaaatctagtgggtttaagcacttactgtatacaagacaattttaggagcctcgaatggttacgtttaacagccctcactactagtaatccatccctgaggactgtctcccccccccccccccccatcttgcagacctgagaactagatacaaagaaacatttagccctgggtcacatagccacatttgggcattgtctggatttgtgtttcagactcttctgtggcattttctagcctcaaggatggcagtctgtttggttatttgagacaggatctggttgccctatagtcaagccaatctgaattctcagtcctcctgccacagcctctgcagtgctggcattatatgagttcaaccccacccctggtgagagctgtttctatggtgggctgcagtgatgggctactaaggacccaggcagggtgggttactgagcagcttgtatagttgctttagtgccatctaaatactctcattttctaagtgctccctgtattgataaggcttgaatgtgatgatttttttcacacaaaaaaaaaaaaaaaaaaaaaaacgcccaaacaaacaaaaaaagaagacatcttagattaattctttacagagtcttataatcttggcgtcagcctcagtttatttcatttaaaaagaaaaaaaaaaacaaccttctatagtgtttttgatcagggttggtgttgaaggccttgtagagtctctgcagacaatgaacaaaaaggaggtcaggacgcttaatacagatttagaaattattcttgaaaatgccagcataatcgcaaaaacttgaagactttaaatgaaaaaatccaagcctctgttgaaggcatcatgattgcacagtgtctggacagtgtctttctgaggatggtttagtatgttactcaggaactaaaaagggctcagaagtgaagatgttcactctggaaactgttttgtttttgtttttgttttataagaagggcaatggcagccgggcggtggtgacacacgcttttaatcccagcacttgggagacagaggcagccggatttctgagttctaggccagcctggtctacagagtgagttccaggacagccagggctacacagagaaatcctgtctcgaaaaagtaaaaaaaagaaaaaaaaaaagggcaatggcaagtggtaactggatttctttcttttttaaaaattttgattagatattttcttcatttacatttcaaatgctgtcccctttcctagtttcctctccgaaagtcccctatacccaccttgctccccaacccacccactcccgattcctggccctggtgttcccctgtactggggcatataaagtttgcaataccaagggacatctcttcccaatgatggccaactaggccatcttctgctacatatgcagctagagacatgagctctgggggtactggttagttcatattgttgttcctcttatagggttgcagatccctttagctccttgggtgctttctctagctccttcattgggggtcctgtgatccatccaataactgactgtgagcatccacttctgtattttccaggtactggcatagcctcacaggagatagctatatcagggttctgtcagcaaaatctttctggcatagtgtctgggttggtggttgtttatgggatggatccctgggtggggcagtctctggatggtccttcttccgtctcagctccgaattttgtctctgtaacttcttccatgggtattttgttccccattctaagaaggaagtaagtatccatactttggtcttccttcttcttgagtttcatgtattttgcaaattgtatcttgggtattctgagcttctgggctaatatccacttatcagtgagtgtatatcatgtgtgttcttttgtgattgggttaccttactcaggatgatatcctctagatccatccatttgcctaagaatttaataaattcattgtttttaatagctgagtagtactccattgtgtaagtttaccacattttctgtatccattcctctgttgagggacatctgggttctttccagcttctggctattataaataagaccgctataaacatagtggagcatgtgtccttattacaagttggaacatcttcttggtatatgcccaggagaggtattgtgggatctactttggaaactgataactatctcaaagtgattctcacgggaatacagacattggtatcaagaatgtctgggaaaagatgggataattttttctcatgatatgtgagaatgaaaaaatatttgaagatcaatgtttcttttgttccatgatctcagatttgtgtgcatattttaaatcattttataaacatctgtagcattttattcaatttggcaaaaataatatttgaggcttctcactgaaagcatggtggttagctgacactagaggtgtctcctgccctgagactctgatggcttagcaggtgctaaggtcttgggtcgcctttgctctgttgggggcagttggattatgactgtgtgcttgtataatgttcccaatttgatttagtggagtttttgttaggatttttacatcagtccacaagtgagagtggagctggtttcctttataccggcaggctctgttgtcttggttaaattcatgtggtaaaataattaggatgttttccatgtctcgttctatggtttgagttagtaggcgatccttagaactttctttgagggcattttaaaagttatctccagagtttaagtcttctccttactcatgtctggatgtgaggcgtccggtgttgtaaacatggatgaagcctgagatccggtgactcctgtgattgcaccgccacgggattcttctttcccgtaagatttctgtgtctgcccgcgtttcagctcattgcctttattctgtttgacttatgggaaaaccagaccttaacaggatgacttgctaatttagcctcttttcttatcttatttctttctggctttctgtcctttcccccggtccccccaccccaccccccactcctctgcgccaccagctgacagacagtcttgccattttgatcagcccttcagtgaccgggtggaggtgattgtgactgtatctttagcatctctgcagtccgctttccttggcctcggtgccctcctcactgaatttcacggtagacaggattttcactgttacagcttgactgcatgcccagcccccctctattcatttcctccacttgcttatggtgtaaatgggacaacttgaggttatcctgtgagctggttcccagtccccattttatcaaagaaggaacccaaacttcaagaagctacaaggttagcctcatgtcagacacacaagagagtcagaattcaaactcggatctcctggagtcaatatctaactgctaatcagttgtcctcttcagctcatctcgtggtctttcatctctccttagcttcctcagcatctgttcccaaagccagccttcccccaaatcttttaaaggagaattctagaatctttgtttttatgtcaaatcattgccagctgtctattctttctctgaatgtgagtgatatgggggtctagaaagactacacagcacgtgtggccaattctatcccacatctgtgtcttgtcttgtggtcaggtgatgcacacagcttactgagttaccaggactggagtgaagtgtgttccaccttgcagaagccatttgaccaagttcatttccttctcttgtggccaccagttcttctgccaaccaaaagcaccttgagtgtagtgacctggctctacccagctctgccccgttaacgttttacttttgcatatggcccaggagacgagacctcttagctatgtatagaagggtaaagaggtaatgactctttggttgtgcacaaaattatcactcccaggttttctcttgcctcagttcaggtaggtggagaagctgctgtccagagaccaaggagtgtgtgggtcagccctgttggccttaaaagttggggaacagtttcaagattctagcattctctcactgtcttcccagtgtcatgtcctgagctatgatgtgattccagccttctctgtttgtttttagctagatattggctaaaggaagacgtgctaggaggataagatggtcactagatgacacacaccctcccccccacacacattacagctcatctttttagctgctaaactccaggagtctgtacaaaattcagttccaagtaaggctactcaaaagtgacgcccttttctggtttctgtgggcactgtactcacatggtgtagtcacatgcaggcaaaaatccatattcataaggtaaaaataaacaatttttttcttaaagttaaggctacaagcttgaatttaaacattgtgttcttcatgccacactgatataaattaccattggctgattcacgtcatcctggtatgaatttagtttgtttgtttgttttctgtgctggggtgaaatcaggagtttcacacatggtgtagccagcttaccgcttggctacagccccaccttatccatcctttctgcaatatgggatggattttactgtaagcaaatattgcttgtctcattacacgtggaccattgtgttctttatatagcagtgacccttttgtccttctttgatagcatgtgatcagagtttgggtcctcctattcctagggatattgatagcttgatagcgtgcagtctgcagtgcttgggcaatcttgacagagattggggagcatttgcagagagctgtcaaagggtgcagcctgtgacgtgctctggcacacatgtagtctgtgaggcagtaggttcgcaggctgtgggttcatagtgcactcgggttgtagacctgaggaatttggaatgtgtggggtgggcctgggccgttctgactttacagtgaagttgccattcactgaggggctctgaggtgctcgggtctgcgcttacatggtggagaaagttcttatccatgatgtcagtggcaccttaaacaccagaacctgtccattttttttatgcaggattcccttcaggatgggtagctgacagtagcatagagtgctgttccatagctttaagtatgctgtacagttggcagatttataaaatagcataggactcttgctaagaacaagccgtctgcctgctagccagctctagacctgtaagtgaatgtctcacaaaactgagaactgttaactgaataaaccaggtcacactgcacaccactgctcaccttgctgtgacatatgcatccaacacatgtctgacaaagagagaatatcagtgagtaagtgggttggacctgtgagaccggagtgacctgtccttgagccagctattgatccatgctatctcttgagatgttgcgtattagtgtctgcacaaagagcgtgttgggtcacttgaaacttttactcataaggggtgttcacttactgatgactacactgagggaaaatgatagccaatgtactttaagggctctagaccagtcttgcttttagtgtctctgtgacaacccactgaatcctcgatctgtttctacggaaaggacgcctctcaactcttacgtttatagattgccagtgttttattatattacttaataggtgcaagaatatcacatcgttgatattttgaatttttgatttgtgtaacatgagataatgaacattctcacacttctgtgggcagatagtaccgtggcctttttgagttcattattaatggaagagggtattgaactgggcacatttattgactaaattgcaggaagctttctaattgtttcgagttattttctccgctccctttgtgtttcattttaaaggtcacagttatgatggctctgtttctgactagtcccacaacttcctgtggcttcagctccctctgaggccagaggggtcttcggttgcacaagcttcacaggaagttgagtgaggatgaaggtagattatagagagtggaatgagaacctagaaagcgcaggtgtacaaagtaaagccacggcgcatgcgccacgccgtgccgttcacggttgtctggtctgttcacatctgtgtgtcctccagtaacagcctcagcaagtgtttccagaggttactcctatcaatcaggctaatcgataacatataactgtccactctgcaaagcagtgttacttggacaatgtgttgcttggacaaggtagtcttgtccaaacatgactgcaaggatgagctgataacaagattctacttcggaggaaccaagtaaagttaggaactagttcagaaaggttctggtgaaccgcagctcggaggaacccttgagatgagtgcgagcggcagctgctgtgagagtaaccagcagttgttggggtgccgccttctttctgccagtcagggccccagcccgtgggtggtgtcgcctctgttcagagtgtcctccctccttggttagaaggacactggtcaacactactcagaggcgtgattctgaatccgtgtcaggtggagaatggaaactgtgtcccttgtcagctccatcaatcatgtccctttaaattataacattgtgtccctgtcctctgaaagagtcacgtgctgacccctgatttacacataaaaaagtttcaagttctgcctccaagagcttaagacaagccatccaaccaacctgctagtagtatatgacttttttttttattagaaaaagtatttgcttttattagtgtttataaagcatccagagtaggataaagtttatcatttatgactatcattttcatttttttccattttttaattaggtatttagctcatttacatttccaatgctatatcaaaagtcccccatacccacccaaccccactcccctacccacccactccccctttttggccctggcgttcccctgtactggggcatataaagtttgcaagtccaatgggcctctctttgcagtgatggccgactaggccatcttttgatacttatggagctagagacaagagctccggggtactgcttagttcatattgttgttccacctatagggttgcagttccctttagttccttgggtgctttctctagttcctccattgggggccctgtggtccattcaatagctgactgtgagcatccacttctgtgtttgctaggccctggcatagtctcttcttaatttaagaaaattattttgtcgctaggctgtggtggtgcacgcctttaatcccagcacttgggaggcagaggcaggtgggttactgagtttgaggccagcctggtctacagagtgagttccaggacagccagggctatacagagaaaccctgtcttgacaaaaccaaaaaaaaaaaaaaaaaaggaagttattttgtccctccctgactccagttgtcactaatggaaatgcacatgagcagtatagaggccagtgttggtagccagaggaagaaagggccaggtaacagtagtttattattagttagcagaaagtggatgggtgggaggtgccctgggtctggagtctttaaacagagtatcataggtaaaggaaacatttaagtctcaaggggacagcaaactggtgttcgaatgacaaaaggcttcatactgtttaccttcatcctttccatagtataaaaatggacatttgtttactctgtagttttgtggtattttttttcccctaagggagaaaactgagagcgtctaaattttcgctgctgaagcatccaaacagctatgttcttccccatttggctatgtacatgtagaattctccctgagggcagtggtaagggctgtatatgtgtgtgtcataaagcctttgctcctaacgtgagagagctccagggctagctcatggtgagcgtgtcccagatccctctcctctgtgggcttcgccccgaggccactgtggctgcctactgtgcctcaagcctgctgagggaagtccacagcccctgcctccgcaggttatcagccgctcctccctgatgagagggcctgggaaccagggctgaggctgggctctgccctgctggacttgttatcctttcttttctctcttcattctctgctttcagaagcatcagatcccccctccaggactaaagcaataaggaacgtatttgcaagcatccccggttgcttctcttgctgactttggcacttgagtacatgcaacaaccaactctggacacaaaaatgctgccttccaggcttggttcctctcctgcagagcaaccctaacctcacagggctcttgtcttctgttttcttaatgagaaaatagtttagggattattggcgctgcaggtttactcttttcttgtgttttcactcttaatcatctgcagtctctatgatctcatgtcttcttgtttcagtatggctacatctaaccaacaactcaatagtgggggtgggggtgggggtggggggagatggctcagcaggcaatggctgctctcccagaggacctatgtttggatttccttcctaccttccctccttccctccctccctccttccctccctccttccttccatccctccttgcttccctccctccttccttccctccctccttccttccctccctcctttttccctcccttcttccttccctctctccttccttccctccttcctttcctctctccctccttccctccctccctcctaccctccctccctccttccttccctccctcctttttccctccctccttcctccccttcctccctccttccttccctctctccttccttccctccttccttccctctctccctccttccctccctccctcctaccctccctccctccttccttccctccctcctgttttccctccctccttccttccttccctccttccttccctccctccctccttccttccctccctccttccttccctccctccctccctccttcattcctccctcccttcttccttccctccctctttccttccatcccttcctatccatgaagcactttccacctcatttgtgtaggacttttttttttaagagttgttttcaaaagttaacaaaccttaaaagtagcatcagtgatgtggaaactgtcacatacctgcactctctgctgttagttcagcctatgaccgaatgacatattcagatatgaatttatcaaatcatgaatgaggtgggactgaggagaatggagcacatgtctgggaatggaggccacatggtgtcacctaaacttcacactggtgtcactctaggttaagaagtcctctctaagtccagcagtagtaataaagcaggctgggtggtggggtgctttgtgcacacagtatttcaggtcacatctctgtgtccttgaagggtgtgtcctgcctggcttctgtgaacaggttgtcatcagactgtttttcctaaatacccatcctgtcctttgttggtaataagaatttatagttaaagggcatggatctgtgattttagttaatacaaggagccagttccgtcatcagtgagatagagcctctgcctgtggaggacctagcatagtgctggtctggggcataagcatcactccaggccacgggaaccttttcccctgtctgaggctaaagggagaggagggacagagccacgttggccccttttgccagcatggtgctgactgaagaacccaggaatgttgcgcagtggatatagtgtacacatttgaaatttaacttcacacttacatggaatccattccaggataagaggcagtcgagaatgatgaagtttggggaagagactggccatcagcctggcttatggaaaggtgggatccaaattaggctgtgttcacaatcactaagctggaaggaggcaaataacaaagagacaggagtatggatgtgtgcacacacaaggacacgggaagagggaagcaaagcacttcttggcatggcgaccaggacttggtgctctcagctgcacacagctccacggtgtagacgagacacaccctccagggctcttcatctggcttgaatgtataagaggggatttgggggctgtttcagaattgcagtgaattgtggtggggaagacacagaggattagttcctggtgaccacagtagcctaggaaggaaagaagcagggacagggacgggtgccaccttcagagacccgcctccatcagcaggtgtcggccagccaggtcccacctcctaaaggctccacagctcccccaaataatgctaccagctacagaccaagtgttcaaaatatgagcggattggggatatttcagatgcaataagatgtacctattatatatttcagcattttttcctttggggtgtttcaaatataactatctcttttgtaaataaaaacctcaattgtggtgaggttattaaaagctccaaggaaccagtggcagaaatggtttggaattttaagtggcttctagtctagatattacattcatggttgtcttaattcaggtttctgttggtgtggtacaactctgtgaaaagagagtgttcaattgggtgtatggtttcagagggttagagtccatgatggtggaacaaaggcatggtggcaggaacagctgagagctcacatctgagtctgcagcagaaggcagggggtgggaggagaagaaagacagagagacagagacagaatgagaatatatatactgggcatagtgtgagtcctttgaaaccttgaagcccgcctccaacaagaccacacctcctaatccttcccaagtagttccaccaaccaggtccacgtgttcaaatataggaacctatgagaaccgtgcacattcaatcccacagcagtctggcatgtgtgtgtaagaactaaaatgtcttttgtttcctgtggagcgtactcttctgagaactgaaaagactcacttttagatagatctattttccttaagttctgtgctggctctttagcagtatatttacaaaatacctgaaagtaaaaggaggtaaataatttgttgatcttggtccttcttaccaccctcaacagttaaaacaaaaccaaacccagtttgtcatcctcctgtctttcccccagctaagcccaaagtcatatgactttccttgtgttctcatcgctctgccagctcatatgcttcaggaatttaatcacctgtattgctgcctatgattgaaaagcaatggcatgtactttttctgagggaatgtatttccatttttcctggacagccacccttttgttgatattttagcaaggcttgggaccttaattgattgtaaggcttcagcaagatcacttgttacgcccagtacagaaactgtgttcctgtgggttagtgaacaagtcttgtgaccatcggctggagatcctgcagagcgctctaaatgagaaaccagcaagcatgggtcatgataatgagttgttccatggctgcagatccaggaaggagcagacataaacagccttttccgtgcagacaagcagccagccagccaaggtgtttccttaagtgtggaggattgaaaaatggatggaacctggagtggatagtttaccacatgtaaaataatcaccatgtatgaatacagtatgtgaggagtaagaaacacattttggaaaagaacagtgattttacatgttgtcattgaggacagcatcttacttttagagtccatggtgttatctcagccagagttagccttgttccctgaagcagatcgctgccctgtccatccctcgcccacccacctcttttctattcttggctttgggtatacattgcacttcatagagaacacggtactcaacccagactttgtcctaacacaaggaaattctattacatcttaatccaggaagatggcccaagccaactgaatggtggaacaatataatatacctgaaaaattccaggcccagtcagtataacattctctggaaaatcttattaacagtacactcaactccttggcatgctggggaaggagagagggtgggcagccaggtcctagtaaagtcatggacataaggctgagagacagcagggattctggacgcagagaaacatgagctcaaatcctcatcctgctgcctgctaatctgtgtctctgtggccagtccttttctcaatatgagtttcttcaaaatggaactcagacttaccaggacttctgtaagaatccaatgaaagaattcatctaaaacacctggaagggaacctggcagaagtaggaatttcacaaatgaggctgtgatgactgtctgcactttctaggctttggcctttttgcctggtcagagggaacactgaagcagtagcctctgggtggggcatcttagtgcagaatactgcgtgtgcgttccgaaggtccgggttgaaggaatctagctgtcccatggacagagaccagcgtcccctgggggagtggttgataaggtctgtccagacttcagaaactcattttcaggtcaatgaacaacttatttagacactgtagtaaggaaaaggtttttctgtaagagagacagaagggaaaattgtagactctatgagtgcttgtggtactcagagctgaacctctgtgctgaagtcctcagactcggcagctatgcatggcttgaacagacagaagccctgattaccagcattacattaaaatactacagaggttcttaaaactattcaatacttgctttctggctttaatccttcctcagaacgttaagtcatagttgtccatttctcacatggaaaaaaaaaagtggccttgggagatggcaccatccacctgaaatcaaccccctcacattctctgcagacacagaacacacccatcctcacgacattccatttcccattgtcttttgagtatcaagaaacccagtgttattgggactccaaagccagatgtggttgtcactaactattccaggtggcacagtgccacttgattcaaaacaattgcatccagcagtcccaggctttcgtttgtagctctgagtatcttggaggcaccaatatggcaggtgcctccaggtgtcactgggttccttaagttcctctcttgctgcagctgcttccccctgggcatccaagacctgtccctggatctacgtgtcctctgacactggaggacttacatgcaccacctagatgtgcagggagccagtctccacggggccagccttactcattggcaactagccggttcatgcttctctcagtgagagttctgaaagctgctcagtggactcagggtcatggtaagactgtcatcagtcatctgtgacagtggccaactaggatgacatcacatccgtgtgctgcgtcttccttttcccctgtttgtccccagctgctcactcctactctctgggatcacttccaaaataaactacctgcctgcacactttcagctgaagcaaaactagcacccaaaagcatttacccataaccacgtttacactaacttccttcatcgtcaccaatctggggagcttaagaagttaacagcttagttttatagatgaagaaattgagccccagaaaggttaagttattccccaggttcatacaacttgctggagatagatgtgcgaacagaattcctctggtattttggctgcttgtcttctgaacatgctaaccattccatcacttccttggtcacatgctggctgtgaagctgggctgtcagtacacagagaatcagtgatgacaaaatttgtcctaagaagtgcgaatgctatgtgctttctgcatacgtcagtacgcatggaaaacagaattgacggaggctgttgctctgcagaatgagaggacagagcaaggtgatacccagacgatgcagtggtggtcggctagggaatgtgcgctgggaagaaactaggatttggtgagggtcattaaagcatagtggacagatggtgtgattgaagggctgactaagatgatgtcctggaccattactgtctaataggaatgcaatgtagatcattaacgtgagccacagatgcaatcttacataccaaagttaaaaaaccagagagccaggtgaaattaaatttagcaatatattttttatccagtatatcaaaaaaaatcaccactccaacatgaattcagcatcaatagctatcaaggagaattttgccttttttttttaaaaataaaacccatgcattttatacagacaacacatttcagtttaaattcactacatttcgagtactcaatagccacacacaatggccagtattttgttcaattcagttctgcaggaagtgagctggaaggctggtcagtggtcatcagaaaatgttgctagaaacagtttgggggtgggggagtgtttaaaacttaattggtatggattgttatggcagagtggaagatgagctcacccaaggagaagccaagctttttgaagggtcatctttggacagatgagatgtgttgataatgaaatgtagaattgtgagggctggcaggatggattggcacatcaaggtactgccaccaaacttgatgaccagagttcaactcctgaaacagtatatactgtggtatgtgcacacacattcacacagattgtatgtgcatgtgtgcctactcacacacataactaatggtttttttccatttaaacatttttatatatgtttatatcttttttcttcatttttttaattggatattttctttatttacatttcaaatgttatccccattcctggtttcccctctgaaaactccctcccccatttcctctctccctccccctgctcaccaacccacccactcctgcttcctggccctggtattcccctacattggggcatctatagagccttcacaggaccaaggacctctcctcccactgatgtccgactaggccatcctctgctacttatgcagctggagccatgagtcccaccatgtgtactctttggttggtggtttagtccctgggagctctgggggtactggtgggttcatattgttgttcttcctatggggctgcaaaccccttcagctccttaggtcctttctctagctcctccattgggtaccctaagctcagtccaatggttggctgtgagcatccacttctgtatttgccaggcactggcaaaacctctcaggggacagctatatcaggctcctgtcagcaagcaagcatttgttggcatccacagtagtgtctgggtttggtgattgtatatggggtagatccccagatggagcaggctctggatggtcatttcttcagtctctactccacactttgtctttataactccttccatgggtattttgttcccccttttaagaaggaccaaagtatccacactttggtcttccttcttgagtctcatgtggtctgtgaattgtatcttgggtattccgagcttctgggctaatatccacttattagtgagtgcatttcatgtgtgttcttttgtgattggtttacctcactcgggatgatattttccagctccatctatttgcctaagaatttcataaattcattctttttaatagctgactccattgtgtaaatataccacattttctgtatccattcctctgttgagggacatctgggctctttccagcttctggctattataaataaggctgctatgaacatagtggagcatgtgtccttactacatgttggaacatcttctgggtatatgcccaggagtggtattgctgggtcctcaggtagtcctgtgtccaattttctgagcaaccaccaaactgatttccagagtggttgtgccagcttgcaatcccaccagcacagaggggtgttcctctttctccacatcctcgccagcatctgctgtcacctgaggttttgatcttagccattctgactggtgggaggtagaatctcaggactgttttgattttcatttccctgatgactattgatgttaaacttttttttttttttaggtgcttctcagccattcagtattcctcagttgagaattctttgtttagctctgtaccccatttttaatagggttatttgtttctctggagtctaacttcttgagttctttgtatatattggatattagccctctattggatttaggattgctaaagatcttctcccaatctgttggttgctgttttgtcttatcgacagtgccctttgcctttacagaagctttacaatttcatgaggtcccatttgttgattcttgatcttacacacaagacattggtattctgttcaggaattattcctctgtgcccatatgttcgaggctcttccccactttctcctctttaagtttcagtgtctatgattttatgtggagctccttgatccacttggacttgagcttaagaatggatgaattagcattcttctacatgttaaccgccagttgagccagcaccatttgttgaaaatgctgtctttttttccactgcaagcagactttgtggtcaccttgttgaaaaacaaaaaaaaaaaccttgatttttgggctcctacagatacatagaactcttttaaacgtaagggaactctccataccttccactaattagcagatacgcattgcatctatgcaaccaccccgcagatgacacaatccagtttgacatctgcagagcactggggctgtatgttagctgtggcagtccctccatgtctgggacccatcaatacattgcaaaccactgacattgggactggacaggcatctagtgggataagggctgtgaggtcctacagcttgacctatcagggatgtcacaggctaccggcacatagtgggtggtgatggtgtcatattgacctgctatataagattgcagtaggcatccctgcgagggtatttgagctctccctgcctccccccttctctttctcccagactaaagcacagggtttgttgcttatgtcccagatcggttctaccccaactgaaggagatctcatacctatggaggatcctgaagcttgtttgactcggctctttctctactgaagccaaacgtctcctattggtgctctcatgtagcagagaaagagtaattagcagaaccatcaacaggggactgaagcgcagaaactgcttaggtgcttcacacttctgtgaaaacccaattagcactcttttacggttgtaatttttaattactgtttaagttgagaaaaatgtattcgctaattagataattactgggtagtgaccttttgatttaaaaaaattgcttcgagtctgaaattgtctcaagaagaattgtttaatttaataaatcactgctgctttgatgtcatagaaaatctaacactgagaaaggtctcaaatctgctaaatttccagagacccagactcccaaccacatggaattccagcttcaggtgatccagtgccctcctctggcctctgagggaacctgcacacatgtgcctcatggttttgtttggttcttttcctcccccctccctccttcccacctcccttcttccccctctcaaacacacacatttcttcataaaaggaaaggctgtgaggagcttgcttataattccagcactcagggggttgaagtgggaggattgggtctaccaggccagcctttgttaagaggaagtctgtttcaaaaataaggtgtgtgtttgtagggagtggggcttgtggggaagaacagaaaaggatagaagaaaaggaaggaaggaaggaaggaagggagggagggagggagggagggagggagggaggaaggaaggaaggaaggaaggaaggaaggaaggaaggaggaaggaaggaaggaaggagcggggatgtaagtctatcagtacagtgtttgattagcatgcatgaggcccttggtttgatccccaacattgcatgaactagatatggcagccaattcccgcaaataggtaaagagagaagggtcagaaattcaaggtcatccttggattcatagtgtgtttgagggtagtctgggctacataagatagggtctccaaagagaaaaaaaattaaaattaaaagaaaagaaagattttctcccctgaggtgatgattggtatctgatcctataatttgatgagtatgagtgacagcctactcaggctgcttcttgttctttgctgtagtcgtgtagtttttaggatatgacaaatgatataactttatagggaaactcctggcttgtgatttctttcgtgtgtaaatatttatatatgtgaatatgcatgtgtgtgaatatttatatatgtgaatatgcatgtgtgtgtgttcatgtgtgtaatgaagttaagtctttcctctttaaaaaaaaaacaaaaacaaaacccaacaactacaggactgattactgtgtggtattagttacatatagaatgcttagttgcgatatggaagatattacttctatttcttaatccagtttctacatttgagctgagctttgagttaattctattcagggttaagggactgtgtcttgttgctgccggcagcatgaggaagtatgggaagagtttgagttgtatcttttggcttgtttccagatactttgatttaagatgatccagttttgactttccttatcttgatggtttaatatgccacctgtatatacaactgcagccacagcaaggacttctggggtgtgtcctagcacataaataagcaaattccagtgagattaagcaagtgtgtgggatagataccaaagagaaggatgatgaccacagcctgacccacagtgtccctgtgccttctttcgaagggccatttagcttgagttagaggtaggttatggggcttttgttttttgttttgttttgttttgttgttgtttttttgtttttacaacagaaaacaattagaaatatagttaatacagtttccaagttaaaagaaacttgggtatgatatatgtactatctgatgccaccaacttgagccccttcctgtctggaactctctgcacgctgaccttgctgagactgagtgcttattgtatgtgtcccctccctccctgttctgcaagtctaacccacactgctgtgttaggttttgtcccacacccagcacaggaggtgctcttcatgattcatggtctccttcccttgtttaacaccaatttctttcagcagaattatgctcactgggaagagggaccttgcctgtctcggtcaccaccaagacattgtttaatgacagagctctgaaaacatggtttttgtcattctcttaaacaaaaagaaggaacaaaaaggtactcactcatttctcctttagttgtaaattaataccaatgaataatgaatgctttcagatttttagatcaccagattagactctttaataaaccacatttattttgttactttatgtatatgagtgttttgtctgcatacatatatatgtattacgaatgtgattggtgccctggaggttagaagatgccattgaatcccctcggaatgaagttatagatggttgtgagctgcagtgtgggtgctgggaattgaatctgtgtcttctgcaaaagtaactgctcttaattgctgagccagctctctagacccaactcagtcgttttagctataatgtccactgttaaaagaaatccttactgtctcttaattaacttcatttaaaaactatctcattaatctcaccagattactcatattcctgatttaaaaaccaacccatgattgaagaagaaaggtaaaaactattgaaaggataaagaggaaaatataaattatgaactgtgttattcttgagaagaacatttaaactcatgtgagaaagatttaacaaaatagaaaaaggcccagtgatgtggtaagatgggtcatcctgccaagccaggtctccaagtttatttgtaaaaataaactcacatgaagttctcatttgtgtttgatcatagtataggagaagcttgagaaccaaatgagtaatagcttgcattgtccaacaggacagaaagcactgagtccacctagatgtctacgtttgttagtgactcacccgtactctgaaacttgctgcaaattaaatgcattctatgtgtgcagtgagaggcctccaagcctgagtgcctgagccccatccccaggacccacatggtcgttgtctcttacccttcacgagcatgctgtggcacacacatttgcctcaccagcaatggaataaatcagtacacataagcattgtttaaaagtccaaaatctcattcaaacaaacatcattcccattgtaccctgtggctagcttggaaaagtgttggggacggtgacatcactctggctggccggggtgctcttctctaagtccttaccttctatagctgatcaggcttttagtctctctctctccctctctctccctctctctccctctctccctctccccctccccctccccttctctatcccctccccctcctcccctctctctctgtgtctgtctgtctgtctttctgtctatgtaattataatagtgcatttcttcttttttaattaaaaactatattatgtgcatggctgtttgcctgagtgtatgtacatacatcatgtgtgttctggtgctcaaggagtctagaagaagctatcagatcccctggcactggagtttgtaaggtaccatgtaggtgctgggaatccagctcaagtcctctgtgagaacagcaagcactcttaactaccaaggtagctctcctacccctgctcatctctttaattcctgaggttatttctttttatttctttttttaaagatatatactgtagctgtcttcagacactccagaagagggcgccagatctcgttagggatgattgttgaaccattatgtggtttctgggatttgaattcaggacctttggaagagcagtcagtgctcttaactgctcagccatctctccagcccccctgaggttatttcttcagcaatctgccttaaaaataatttcagagggttgggaaatggccctgtggatgaagaacttgctctttaagtgtgagaactaagtttggattctagcatgctactatggcctttctgtcatcccagtgctcagaggcagagacaaaaagatctctggagcaaactggcaatctaggttagccaattctgtgggttctagactcagtgagagacccccacctcagtaaataaagtagggagtgattgaggaagacacccaatgtcaacctgtggacaggcacatacacatgtatgcacacaaatgcacccaaacacagacacatgtgtacactcacagcatgcacatgtacacatgcaaaagtcatttctaattgcatgtttgttttctggccagaaaatagaaatagacagtattgttacgaatccatcgcaagaggacaaggttcggtgccttagccaagtggctcaaggtctcccagatgtctctactccgtcctcactagctacggcattgtgttgtccagctgcagggactctcaccttttccctactttagtctgtgttgtactattttacccacctgctgtgctggtaaacctgaaaccattgcagcaaaaaccgcttatttgatcttccctaaaatattctgtctctttttacctcctgtagataaagccaacaggtccttttcctgctagccaagacctgtaatgagagccaggtggaagatacagctttccagtgtagttttcatgctcactgagtctcacgtagtctgcaagaaactatgggcctcccccttggctccatggctgcacttttctcctggtcagcccctgtcagagtgatgtggtgataacgtcaccacagggccacagacagcctgctggaaagggagcaggagtgtgggcctctaaggctgccagaatcccattcacatccaccttgctgttttctccttcacagtcacaatctctgggtaccacggtcattcaggcaccgcttacttgaaccagataggctgtagatagagaagacctggtgacgttggagaggtggtttcaggattaatagaaactacaatgattccttgagttcttaaaatagatttcaaatgaaacatctggggtctctaaaatgataattgaccttattgctgtgtgctgagatttctgttttagaactccccaaatatcttttttttttccattttacagtgactgtaattacagctaaatattatgatagagatttggttgagcttcaggaaccacagtttaattgtggctttgctgctaacagctgtatagcttctcttatgccatttaactggaccttatctttgtgttgatctctttgataatttttgtgattctgtggtccagtgttaagagttcaaagctctgtgctctccaacccaaagctgtctatccataaaacaccatttcctcttctctgcagagcagagctctgtccaggcaagattactctttaaaatcccttggaaaacccctcccaagagtctgactgcccacatgattctgcagtgtagccagaatgaaaattgaagtggtagtgtgttaatctgttctaagctacccagtgggcacacgcacactcctcactatttgcccaaatgttttggattcagagtgaaagacacacacatgcagccttatttttaatatgccctaagcagcccaacagctgggccattccctgactcataagttgctaatgcctcccctctgatactcctgaattattacttactgaaagttatgtttcacctctgctaccccagacccagctggaggagtgagccctgagcctactcttccctgattctctgtcttctgcagctcccatgctggcatcctgttcctttcctggcatggcggttctcccctccctcgagttccttgcccaggaacctcaaagtcctgcctcagtctccctgcacagcctttggccatcagcaactttatttatcaattagaactagctgagggcagggactgtcagtgtctcacatgcagacaagtgaatcctcttgtaatttgggaacccaattaacataatataagcaataaaccaaatccataacatctcatcctttccatccattaaaaagccttttctctcagatatacattgaatgtagttaacagttgcgtaaactataaggtatgatatacactaatcatgtccagtccatcaattttgtcaatttaggttcattactctaacatctaccctaacttaaagagtttacaattctgtacctgaattatgttttgatttcaactacattaccatatgaaaaccatcctttcaaatctacatcatcttccttaagtgctagacaacttaagtttgattatgagattataactagtcttcaaccccatcagagatccaagaacgaattaaatattgcctgaatctataggaaacacaaaaacatagctaccaaaacttcaccaatttgcagaaacagctgactacctggacagttccccattcctcaaaacgtttgtcttcagccttctgacccagaatcacctgacagaacttaagtgaagcaggaactatgaaggactagctaacgctgtattggcagagcaaagctgtcgactatcttggacaatatttttggggggtggggtggggtctgtaggtgaattagggtaattctttcccagtggctacttgccacaactggaacaactccatatggaggttatgatgctcaatatcttctttgaactgttgggaactgacatgcctcttagtcaaaattctgataataatgaaatgattataaatgccatattctgtggagttctgatgtttttgaagactctctatataaagtatatctgaactgttaaatcttgactactcttagctatttctatttgaatactattaaaaacactttattataattaaatcagaatctaatataaccataagcttactatctagcccttaacttgtcatccttaatcatcccaaacagtttgtaatagcagctatagaaggccttatattcttaaatgagttgcatgggcacaactgctaatgcctagctaagagtaacaatattaatttcaaaatttgtatcaatacataaagatttataccaatgaaaactttaaatctgtatcaatatataaattctgtaccaatgtaagaaattatagcttcaattttgcatctattataatgatttctatcagtgtaagattatagatatacagtgctttactcaagaataagtttagtaatccatcccatctgttttctccctgttcaaaattatgatcacttccaaattatcccttagtgacaacctacctataatttataaaataaccataaccagaccccaaaaccaaggggtcgggatgatgactttcacaacttctccctgctgaataggggcgatgaaaaacattttaaaggactgtggagggatatgaaaattagaaaaattggttagaggccaagcgttggtggcacacgcctttaatcccagcactcgggaggcagaggcagaggcaggcaaatttcccagcctggtctacagagtgagttccaggacagccagggctacacagagaaaccctgtctcgaaaaacaaaaacaaaaacaaattggttagacttaagaaagctagctttatcatcggttattcagtctctgtgtgcttagaaggcttaggacttgactgaagttctgactggctctgtctgaaaggctggatgagctgagtccatcaggaatcagcagctgttcctgacactgtgttgggaggcaggtagctggagcagcaggtcacctcagcatccctgtagatgagtgttgtcagagctgtacattctgtaatatatgaatcttacaaccaaatttttagaactattaagatatttgtatggattgtgcaagttgcacagatcagttaaggatgagattttgctcctagtttgagtaggtaaaaggcaactctccttttatgagttaatttgatcaataaccaattgtaataaatcttcaatcatgccatgtgaaggatggcatgatgaagggttccacaaccaacaagatttattgtctaagtttagctgtttttcgctagagacatttttatgtctcagccatttacagggctgttcccttgtgtaggactcagcaaatcaagttacctgtcctgtttgatttttttcaatttttttttcttttctgtagccaaggtcttcatggggccttcccctgatccatgaactctggaaggagttcaaagtcttttcttttttcctattaatacaagtacagagcccctctttcacaatagtaggtccttggtctagtagcctgaaatcatcaaaggtatagattgattgaaattggcagtctccttcagtcctgacctattttgacctttctcccagaggactaaatcataactaccaaacttataaccacatgcattttgataattaaaacaattcaaagcaatcaaagcaatctaaacaaaaattattatccattgaaacagtgctcccccactatctcttgccttgttcttacacgattaatttttaatagtaaggtcaaagcctaaattcattactatatctatgtatacttaaattatcccttctctgtgggtatgtatgttccttttctctttatattacttgaattagtatccttttctatgtatttatctttaattaaatttccttctatatgtctgtgtcttagtcagggtttctattcctggacaagacatcatgaccaagaagcaaattggaaaggaaagggtttattcagcttatacctgcaaacttctgttcatcactaaaggaagtcaggactggaactcaagcaggtcaggaagcagcagctgatgcagaggccatggagggatgtttcttactggcttgcttcccctgattgcttagcttgctttcttataaaacccaagactaccagcccagagatggtaccacccaacaagggactctcccggcttgatcactaactgagaaaatgccttacagctggatctcatggaggcacttcctcaactgaagctcctttctctgtgataactccagctgtgtcaagttgacacaaaactagccagtacagtctgtatgagcctattttagtagtaatttgtcataccaggctaaacaatcccagaaatcttgtgtagaccatgttcgaaagatcccgagtactgccctggcatagacttcttcacctctctctctctctctctctctctctctctctctctctctctctgttttttgagacagggtttctttgtatagccctggctgtcctggaactcactctgtagaccagtctggcctcgaactcagaaatccacctgcctctgcctcccaagtgctgggattaaaggcgtgcaccaccagcttcttcacatttcttttaatgaatttttttctcattcattctattctctttatcttcatgtctttgtttcctacatttagatcaaaggtgtgaatttctttattctgtgtatacataaaaacacttaaacaattaccataatactcctttctattcttaaaaacaattaatcagatgtcattcatctctgtcttttgttcatctgagcagtggggcaaccagcctctattgcctgtctctctctgccttctgagtagcctttctgtttgcaaagcaggggttcccagcacctctgagttcaaactctcggaggctgttaaaagcctttgagaggggcccgggataaatcccggacacccagctttgtctgggtcgacttggggaacttaactgtgtctaaggtttcttagaaccttagaattatgcgtgccttttgttcgagttccaaacctgtgccgcttagggagggaccacatgtgtggctgagctctgctcagctgagaaaccaattctcccgtctcctaatcttgggtcacagcttgtgtcttccatttcataatctctgattaatttttaaacgtgagtacaaacctgacacattgaacaacatctgaagtagtatggcagtcagctctaaactccccagtgggtgcactgggtccttcctacacacccaaatgttttggattcagagtgaaagacacacacatgcagccttatttgtaatatgccctaagcagctcaacagctgggccactccctaactcctgcgttgctaacgcctcccctcccatattcctgagtataattcatattacttactgaaagttatgtttcacctctgctaccccagacccagctggaggagtgagccctgagcctgctcttccctgattctcacctggctgtcctctgtcttctgcagctcccatgcttgcatcctgttcctttcctggcatggtggttctcccctccctccagttccttacccaggaacctcagagtcctgcctcagtctccctgcacagccattggccaccagcaactttatttatcaattagaaccagctggaggcagggactgtccatgcagacaagggaatgctcttgtaatttgggaacccaattaacataatataagcggtaaaccatatccacagcatgtcccctgagggtctagatcctagggacacactgctgtcgtacctcccctatgccttaccctttcattctgaagtcaggatcatttcattctttaggagatggtgtgtgtgtgtgtgtgtgtgtgtgtgtgtgtgtgtgtgtgtttgtgtgtgtgtgtggtgtgtgtttgagagagagacagagaaagagacagagacagacagacagagagagatggggagagagagagagagacagacagacaactgtttagactgtctctgaacttgatatcctcctatcccagcctcttgagattgcaggtgtacattcccacacagtgagggcatagctacttttataactttatagccataagagttaaagggcagctgtttcttcttggcatgctgtttctgaatagtcttcattgactcagtgcccccctgtttcagccatgcttggccatcaactcagaaaagcagtaagaaaggtgcagagagcgtaagtactaagtgcccagtattggctttgagctctctgaagtgattcttcaaggaagctcccaggagcggcaacaggaatacctcatgaagcttgtgagaaactctgaccctgaccctcagtttcttccctgaaccagaggcccttaaagtggcaccgatactcccagagccttctaggtaattctccatgctactgttggaacatttttctagaaaaatttaggttttcagacagttgggttttatttctcattttaatgtgatgacattgtttttgaaataatcattggactgctgtggttaggagggatttcccctcccccctttatctccccgtgtctgtctctatagtctctccctcccaccctgtctctctctatctctctctttcctgtagtccaggctggcctcaaactcattatgtagtctaggatgccttttaacatatgatcctcctgcctccatgtctcaagaactcagattacaggcttgttccgtcaagcctagctggacattacacatgtttaaaatatgcattttagttatgtgtatatgtgtatcctagttaggattcttattgctgcggtaaagcacaatgtccaaaagcaaattgacttccacatcactgttcatcatcaaaggaagtccggacaggaactcgaacagcgcaagaacttggggcaggagcttatacagaggacgcggaagggtgttgcttactggcttgcttctcatggcttgctcaatccgctttcttatagaccccaggactcccagccaggagatggcaccacccacaatgcactgcctctccctaccctcatcagtcactgagaaaagccttacagttggatcttagggaggcattttcaaaattgaggttccctcccttcagatgactctggcttgtgtaagttgatataagggagccagcacagtgtatgtctttgtgtttgtgtttctgtacatgagtccagtgtctgcggtgcaggaaaaagatggcgactcccctagagttaggattacagactgttgtgagctgcccagtgtgcagagaattgagtgtggatcctgcagaagagcatcacgtgctcttacacgctgagtcatctctccagccctggatgttatagtttttttttttaaagaaatattttccagcctattcttttgcttgccagaagttttcacattgttttctgtgtttcaaaagcttctttctacagtgaacatttaggcttagcttgtattgccatggagttatgagtacctgttagttcagggatgtactgtgatgtacagacatgagctaaaatggagagatggtcactgataaaacccttgtttcttttcttcttccgagctggtttattttctattaaacctcccagatgctgttttgttactttagaataggaaatctatattatctttttaaaaatccctcttaaacaagtggggttttcccaaaaatttctctagccagagggaactcttcattaaacagagcactttctggaaggagagcgtatgagcttatgtcaggaattaagtgatggagaaggggaaaatgtcgcctggccttaggtgcagaaactgacccagaagccttggccaagtggcgagagttgacagagagccaatcgtggtgcttctgacccgtgccttggcaggaacctctctgctacctttagacttcagagcatctctaactggttggatctttgtcaagagcttggtccgaggtggtttcttttcttttctttttatttcttttctcttgatttaatataaagcactcacaaattctttcaagaacaacacacagctttgtttagctccctcaagccctttcacctctgtcaagttgcaccaggaaatttaaggtctagccagaggcccccaaagagttaaaaaaaaaaaaaaccaaaaccctcaaccatcctgcagagtaggagaaattgatgtcaaaaacagatgtgctgctgtgggccttgctgaattcataagtcaggataaagccagtatgtatgcatgcatcttaaaaaaaaaaatcttggccagaattatagagaaatggaaggtctcctctgcgattcctcttcaggccttgctggccaggagccctggtgaagggctcccgggagacaggtggccctgacaactcctaaccattaagtcagaacgccctctaatcccttgttttccttgttggtgttctgcagggccgagctccctgcacagagcctgcccgttttcattggctttggggattgttattggagtggctgacagctgtctgccaggctgtctgaaactgccttcctgtgctctccacactgctccacttcacagcgctattgttcctgtccagccttttcttaaaatctttcccagctgtatcctgatatggcaaaccacctaaattagctccagattgttctgtttattttatgttagataagtgatagactatagtcccagcagcgggccaaatggagggtggaaatgggggcagggtgttggagggggtcagaagacgctcgattttttactgcacagggagagttccagacaaaactctgaaatggcgcatgcgtgacagagccactagtcctgccattcatacgtgacccagagtggttggcaagcataaactttggatctgaacagcagaaaagagaaatcagaaccccaacacaaagccttactagacagaagcaaaaatatctatcctggggaaaacacataggatctgtcaggttggtttctatgccagctaccacacttgactttcctgtcaacagagacccctctcacttgccagtgaaaggctctgtgggttcaaacctgtccccagtcctttaatctccctgtatgctcggcatttgaaaacatttgcttcctgtgcctgaatttaaagctagaaacccacagcaattgactcgccatcataactgctttccatacagctgcaagtgaaaattcacaatagatttggcctcttctgctcctcttggccatctgtgcaactgcttaactgtggcctctcccctgtggggccaacttctagcagggcctctccacagagaccttccaaatgcttaacaaaaaagtgttttttaactataactagattctctcccaggatgaagacttcatatctgtagggttaaacccagatataatataactagattctctcctaggatgaagactttatgatctgttgggcaaacccagatacaatataagaaatgaacgtccaaagcttgactcagctgaagcaacgctagcagccactgagtgcttgtctctggtaactcaagactccctagtgaagatagccatgactcacttcagagctgggccactcctccccatgctgagccaaagtccttgaaaccctttctgccatgtgcaaagacagggaggagagcagggtcaggagtaataaaaaaaaaaaaatgcccctaggaactgcctctcactttccttttaggaaaataatctcactgtataatttttttaaatgacaaaaccaactggagaaaaataattaccttgtcaaggtctcttggccccagtggatatgcctttggtctctatgaaggtccagtatggagctgcctggcctgcatgttaccccagctctcagcgctggatctttctatgtagccttgttggcttttgattgtgtacagccatgcatttgtccctgggccaggcttctcctagttgtgttcatggaaaggagactgaacctgtctccccttgccacaacactaacagcctaggaggcctttaatcagggcctagcaaaccaattttttttctttaattcttaccttataccatgcacctcattacacttttgttttcattcattcctagactttaaaaacagaggcaaacagctcatgtgcccttggcctgttctcattcaaaccatggtacagctatctccagctagctaagatggagtaaacaagtcaaggcttcctcactgtggcagataaaaatgagaagcagaaagcagactgtctgagacttcatagggcaaatggtaaatgagtggactctgggttttattaattcttgtgacggggtaagctctgtgtgtttgttttctctcctctgtctttcaggtctgacacatgaaacatgaagtaggcactgatagtattcttttgaagaaatccctacttctaatagtgagtgaagaaatcaataatctgaaaaacatgaggaactcacctcacatttctcttctccagtattctctgctctgtgttctatgccctgtgctctgtgttctgtgttctctgttctgtgctctgcactctgtgttctgtgctgtgtactgtgtgctctgtttgctctgtgttctgtgctctgtgttctgtgttctgtgctgtgtgctctgtgttctgtgctttgtgctctgtgctctgtgttctgtgttctgtgctgtgtgctctgtgttctgtgctgtgtgctctgtttgctctgtgttgtgtgctctgtgttctgtgttctgtgctctgtgttctgtgctgtgtgctctgtgttctgtgctgtgtgctctgtgttctgtgctgtgtgttctgtgttctgtgctctgtgttctgtgctgtgtgctctgtgctctttgctctgtgctctgtgttctgtgctgtgtgctctgtggtctgtgtgctctgtttgctctgtgttctgtgctctgtgttctgtgctgtgtgctctgtgttctgtgctgtgtgcttgtgttctgtgctctgtgttctgtgctgtgtgctctgtgttctgtgttctatttgctctgtgctctgttctgtgctgtttgctccgtgctttgtgttctgtgctgtgtgctctgtgccctttgctctgtgctctgtgttctgtgctgtgtgctctgtgctctgtgtgctctgtttgctctgtgttctgtgctctgtgttctgtgctgtgtgttctgtgctgtgtgtttgtgttctgtgctgtgtgctctgtgttctgtgctgtgtactgtgtgctctgtttgctctgtgttctgtgctctgtgttcggtgcggtgctcggtgttcggtgttctgtgcggggggctcggtgttctgtgcggggggcttgtgttctgtgctgtgtgctcggtgttctgtgcggtgtacggtgtgctctgtttgctcggtgttctgtgcggtgttcggtgttcggtgttctgtgcggtgttcggtgttcggtgttcggtgcggtgtacggtgtgctctgtttgctcggtgttctgtgcggtgttcggtgttctgtgcggtgtactgtgtgcaatgtttgctctgtgttctgtggtctgtgttctgtgctgtgctttgtgttctgtgctgtgtgctctgtgttctgtgctgtgtgctctgtgttctgtgctgtgtgctctgtgttctgtgctgtgtactgtgtgctctgtttgctctgtgttctgtgctctgtgttctgttctgtgctctgtgttctgtgttctgtgctgtgtgctctgtgttctgtgctgtgtgctctgtaatctgtgttcagtttgctccatgctctgtgttctgtgttctgtgttctgtgctctgtgttctgtgctgtgtgctctgtgttctgctttgtgttctgtgctgtgtgctctgtgctctgtgttctgtgctctgtgttctgtgctgtgtgctctgtgttctgtgtgctctgtttgctctgtgttctgtgctctgtgttctgtgctgtgtgctctgtgctctttgctctgtgctctgtgttctgtgttctgtgctgtgtgctctgtgttccgtgtgctctgtttgctctgtgttctgtgctctgtgttctgtgctgtgtgctctgtgttctgtgctgtgtgcttgtgttctgtgctgtgtgctctgtgttctgtgctgtgtactgtgtgctctgtttgctctgtgttctgtgctctgtgctctgtgttctgtgctgtgttctgtgttctgtgctgtgtactgtgtgctatgtttgctctgtgttctgtgctctgtgctctgtgttctgtgctgtgtgctctgtgtcctgtgctgtgtgctctgtgttctgtgctgtgtactgtgtgctctgtttgctctgtgttctgtgctctgtgctctgtgttctgtgctgtgttctgtgttctgtgctgtgtactgtgtgctatgtttgctctgtgttctgtgctctgtgctctgtgttctgtgctgtgtgctctgtgttctgtgctgtgtgctctgtgttctgtgctgtgtactgtgtgctctgtttgctctgtgttctgtgccctgtgctctgtgttctgtgctgtgctctgtgttctgtgttctgtgttctgtgctgtttgttctgtgctgtgtgctctgtgttctgtgctgtgtgctctgtgatctgtgttcagtttgctctgtgctctgtgttctgtggtctgtgttctgtgctgtaggctcggtgttctgtgttctgtgctgtttgttctgtgctgtgtgctctgtgttctgtgctgtgtgctctgtgttctgtgtgctgtgtgctttgtttgctctgtgttctatgctgtgtgctctgtttgctctgtgttccatgctctgtgttctgtgctctgagttctgtgctctgtgccatctgctctgttctcttctttgtcccgagaacctgaggcttgtaccctgtctctaactggctgagcgcctgcacaaaaaacaaactcattcctttagagggttctaggaaaacacagtattcaaagtattcaggatataattcagaaatacttatgtcacaaagagcttttctcagagcaaaaaaaaaaaaaaaaaaaaaaaaaaaaaaaaaaaaaaaaaatccacacatagatggccatctttgagatggtttaaatactagaattcaaagataagcatttttttgttttaattttttaatttaattcacacatgcatgctttgtgtactaatcacactcatctcctacctccctacccactcctgtctacatctacccctatccttccccacagttctctctcacgcattcacacctgtctgttttgttttgtgacctaccaagactaaccagagccatgtgtgagagctctgcctgtgggttcagcagagagtagacaactaaagacagtggctcccccttctcacagaatccattaatagccaatagttcagagggaaagggtggagccctgtgagcccctccccttccttcactgagtataggtagggctagtcttgtgtgggctcagcacagtaaatacagttggtgtgagtagatggttacagtagttgtacctagtctagggcatggcattcacatccctctccatcttcttctggatagtacatacttcctgcctcctcttccacaatgttcctagagccttagaggtggtggtagaagtggcttgtttaaagttgggtcggtatccaacacttattctctgcatcttgggcagcgctgagtctctgaactcaccactgttgggtgtagggagaggcctctccaagtcaggctgaagctttctgtgggacagtttatggaagcccttctccatgagatgtcagcaacacagttgaatgagagttgttaagttctcagtagagaaatggagctacaacctaacaaacaagcaaattaaatcaacaagtggggcctaactggaaactgcactattgaaatctagaatatattttcatggcccgaaggaggatgacagtggaaaacaatcagtgaaggttgggatgagtccacgggattatacagctttaagtgagggttaagaaggaccgcagggaactgagtcgaaaggatggaccatctagagactgccatacccggggatccatcccataatcagcctccaaacgctgacaccattgcatacaccagcaagattttgctgaaaggaccctgatatagctgtttcttgtgaggctatgccggggcctggcaaacacagaagtggatgctcacagtcagctattggatggaacacaaggcccccaatggaggagctagagaaagtacccaaggagctaaaggggtctgcaaccctataggtggaacaacaatatgaactaaccagtatccccggagctcatgtctctagctgcatatgtatcagaagatggcctagtcggccatcattgggaagagaggcccatcggtcttgcaaactttatatgcctcaatacaggggaacgccagggccaagaagtgggagtgggtgggtagaggagtgggggggggggtatgggggacttttgggataacatttaaaatgtaaatgaagaaaatacctaattaaaaataaataaataaacaaataaaaaagaaggaccgcagggcattggctttccaagagtaaagacatactgatgcagaaaatgttatgaagcagaaatgtttgaaaatactgcgattttagtaaaaggtccatgaatagattaaagaaagtcggagataaacctactcaacaaactataagaaaacaatggccaaatcataaactgctgaaaaccaatgaggaaaaaaaaatgtcttaaagatagcaatcatattaaaaaaaaaaaaaaaaaaaaaaagtaagcccggagttttccattgtgtagctgctcatttggagctgcacagcatcttgaaagcctggatttggtccccagcaccactccagcagctgtgatggtgccctcccacagtgccaggacttgggtggaggaggagggcccggcgggtcatcctccactacatactttggggtcaaactaagaaacatgaaaccttgtttcaaaagatttttttttttaatttaaaatttacactttgtgcttgtagcattttcattcagtgcttagagttgagcccaaggcctcagacatacctggtaaatgccctaccactgagctatatgctaagtccaacttcattgataacagataaagaactataactaactaggggcttcccacagtgtataaggaatgtgtaccatacacaccagtgtggagggattcctaacacattgtgcagaggaaagaaagccagaccaagattatactttgtgcttttaaatttttatttatttatttatttatttatttatttatttattggcagtttattatattattatagtgctatgaagtacaaaaccaaaaaattgtttgtttatttattgtttttcttttttaaaaaagatttatttatcatattatgtgagtacactgtcactgtcttcagacacaccagaagagggcatcagatcccattacagatggttgtgagccaccatgtggttgctaggacttgaactcaggacctctgaaagagcagttgatgctcttaaccactgagccatctctctagtccctgtttattgttttttgagacagggtttctctgtgtaacagcccaagctgtcctggaactctctctatagaccaggctggcttcgaactcacagagatccacctacctcagcctcctgagtgctgggatcaaaggtgcatgccaccacacctgtgattttatttttaatgaaacattctcacaggagcaaaactttagagatggagagataaccatggaacgagggacaggggttgaatgtataacttgaatacagaaacgtcgcataggagtcctcctggggtgccccgtttcttgagtatgattgttgttccgtggttgtcaaaagtcatagaaatgcatgtagaacaattggatttttatcatctgtaattttaaaaacaaaacaataaaccaccaccagcacaccatctcgtgtctgagagggttaacgtatttccacggccatgtgaaatacaggaaagatttgtgtaatcccttatctattttgaagtcattttccacttgattcatatttaaactttcaggaagccaaaaatggaataaacaatgaggccgtctctctggctacatgcagaaagctttccaaaactgaatcctgtgtttctcatgcctgatgcatgttttatcgggatcaacttgccctcaaaggactccactgagaaacggggtttcaaagtaaggtcactgaagctgagagagactcactggctccaggacatagctgccggtctgtgcacacgtatgtgcatgtgtgctttatttataagaagccaagtcaatgtgacagaccagtgaaagcatgacaaactggctgtgtcccaaaacctaggggttttcatagttaggatagtgtttgaaatacctgtccagaggtgtctaccctgagcctcaagactcatccctgacatccctgaaccaggcaaggcagagtggcgagcgtgggtggtttctgtgatgcaggctgtgtgcattcctgtgacaccaggaagagctttgctacttgtgaaatgcctcgtctaggctagcacattcgggatggatgctccattgcaatggtgcctagcagggactgcactctttccttttgaagtcacatcacctgcttcctcttaaccctgtgatgggtcttactgattcttataggcaagcatagtgtcccaaaaacttagcttaagagacctttgatctatcctgatgcacaaattattttatgtttttctgtaagagtttcatggggtttgttttacttttaagtctttaatctgtctttcctttttattttgtttatgggctggatagttttatgtcaacttgacacaagctaaggtcgtttggaaagagggaaccgcaattgagaaagcgcctctatcaggctggcctttagggcattttcttgattaatgattgatgtaggaagtccatcccactggaaacagtgccagtcttgggtactcggtcctctcctgtataagatgcaggctgagtaagatggaggggagtaagccagcaagtagctctccttcatagttctgtttcttttcctgctccaggtttctgccttcaattcctgtcttgatttccctcagtaatgaagtataagccaaataaccttttctcccatgttgcttttcattagtgttgttaaagatttgtttctagttgatgtgtataagtgtttgcctgtatgtatgtgtgtatgtgtagcacacacacactgcaccaggctagaaggggcattggagccccagcaactgtaggcccagacagttgtgagccagcatgttggtaagaaaaccaggccctctgggagagcagggagtgtcctcctgaccacagagccatccatctcttcagcccttcaccctgtgtatcccagcaactgaaaccaaactaggacatcacacaattgctaattgaggtataattcacataccacaacatttaaaaagcgtgcaggtttttttttgtttgtttgttttggatttttttttgggtttttttgttgttgttgttttactagtttgtagtattttcacaaagttgtgcatttgctgtcatcatccagttccaggacatgtttgtcagctctgacagaaatcctgcacccattatcagttgctcccattcctgtccctcccaatcctgcagccactgtctacggtttctatatagattttcctgcttcggacatgtcatataaataaaaccatgtggtatttggtcatttatgtctcactttcgcttactgtaatgttttaccatgttgtagcatgagcctgtactttattgtcttctgtggtggcataaaagtaactagtttatctggaacctttctgaagagccacctacatgttttcccagggagccatagtgatgtacggggagtgttgcgtctccagcagcagcatgactagttgtcacggctccacatggacaccatcaggtttttagtacagttgtactctgcggtacaaacgtgacatccctggggttttggtttgtgcctacctagtgaccagtgatgctgggtatcttgtatgtgttcattggccatctataaaccttctttggagtgatgtctcttcccaccttttgctcctgttttaattgacttctttgtctctttgttgttaaattgtaacataactggcttcagttttttagtatatgtcatgaggtcagaattagtcaaggtttgttttggttttgtcctggagttttttttttttactcaacatagtctagcaaactgtttccctttgtcaggcttaatacctttgttaaaattcaaatgctcttacaccacagagtaaccacagatttctttgttcagatttagaagtgtaatacataacttcttttcttctcatcagtgaagccaggatggcctgggttcctgttctgctctgtgtgtgtgtgtgtgtgtgtgtgtgtgtgtgtgtgtgtgtgtgtgtagaggtggggggacacctcatatgatgttttgcatgtcccttcccaaattgaattgccacggtgtctatatttgagagacagggatttagaagtgatgtggctaaggatggattaaggccgttactgcaggagtagctttgttgtaaaatctctcccatccatctcttcagtcctcctgttttctgccatgggtttatgcagctctgagagagtccttcactgaaccgatgggcctggattttgaagcccccaaaactctaagttgacgcctttatactcatttagccagtgataatctatgttaacagcaacaacagccagtgcaggccatctcagtggatttatggctcctttcctagagccggggcaggaggtgggagtgtctgctccacagtccttgctcagtggcaacattcctgttcccagcacatctaccatttcacccatcaggaccatcctgggtcctccctgttgcagagactctttgtactacctgcacatcatttgtgtgcttctcaacaacagatagaacattcatgagcggacctgagctcccctgatgctctggtgtggcctgctacctgaaaatgcagaggcttgctgttgcctcttctgcccccagtttcctctcgggcatgagatagcccttatgaacatcattccatattggggtggaatttccagagcttgggggaacccaaggatcttcttagggatgcagctgcactccctcgcttttctgctgtcctctttccttctctaagtagctctgaatgactgtcccagtcagaagtcagtttcagttttctgctgacgttgtccccagagggtaagcattgactgccctgattgcttcctgggttagggtgacaagaatgacaaggaatgagaagaaccttgctatctggaaacatcattgcagaagagataaaagtcaccaagggcattctgtttggtttatgggtagctctttttcgatatttaagtctaacatcactttactccagcatggatttcatatgcatatgcagacgattctggaagagacgtctgtgaaggtttatcttatatcgatatagattgaaacaatgatgtgaatatggaatataaaatgcttttccttatgtctaaactatccttaactgtgccctgagcctctcactagctaatgatggaggatattcattctaacagtttattctaatatgtttcatatagtagctccttactatacaggaaaagtgatcacttgatgttagaaaagcaggcacagtgcacagcttatctttaacactcaggtctttcttcatccattcttcagtgagagagtggcctgcattctggtgcagattttagcctgctcagagactggacgccacccatatcagtagaattgagtgtgagacttttcagtccctgcgctcatctctgataggctggactctgtgagcctgttgtgactacacagggacatttgttttgctttagcagattgtttggtcttgctttcgtcctggttcatggccgttcacatgcctctacttcctgccttgttaacctactctgcctttgctgggcacagagtccagcccaattctcacctcttttttttttttttttttttttctccagtcatcctcattaaagtggctcttgtgcttgcttgggatttcctgcatcaccaaagctcaccatcactcctgctgtgctggcccaagggctgcctctggccacatgaaagtctagtattctggggactcagagagttttcttttcctttggccttggagcaagagtcatctgcacatctaaagacaatctttttcttgcactcagcatctcaaatttttaaccagactgcttcatgtttgggcttatggagttttttttgtctaccattgagtgtttcctcctctgttcttcggacagaagtgctggccagttcttataatgtttgtctgcctgtcctgatgctggacaccaaccaccagtgggatcctttagcatctggcaaagcttcagagaagggctccggggaaatggaactgcccgggaagtggaactgccgggccccttagttcaggtctcactgacttttctaagtctctaaagagagtcaggaagatgctgatattaagagtgctagttaacagcaactctgcaggttttgacacatgtaactaatattgcatatttggaaatacaaaagcaaaatagccaatgcttacctaaacggaatattctagctttctctgatttagcaatctccgagactcactggcctctgcattttccctaccacatatgtagtaatacatctattattttgaaccacaagtctcttttcctgtctgttcataggattttcagttacttgctgctgtcctgagcttgccaaaccttcgagtgcttctgcagtaattagcttattgtttctcagtttggtattactgaaagactaagctgcagactcgtggagaattacctgaccgtcaagaatggtttttaggtttgggagaggagttaaatgattggtcagtaaacactaacactcccgaggggcccccagatgtagtttgcctgcaagtttgtaaaaaggataaaaaaaattttttttaaataaagaatttaaagttgagcattttctgtaagagcaaactataagaaagacagaagattttacaggttttatttttgtttttgttttttctagaatacatacttggtccttctgcttagtataatagccactcggtccttctgaactgcttctcagaggacctggagaacaaagattaagcgtagcattgttattaagcgtagcatcgttatgctttcggagagcaggccgcatgcctccctttgtgctgatcttacagcttcatctgaggagctcccaaacctgtgcacacccaagctttaaattacgaaaaagttatctgcgcccagagtgttgtaaattagaacacttttccggttcccagtcccctcatgactttcagagagcaagtgttttcagtctttcaacagacttttgtatctttttgcccttagtacatttcaaagaagagataagaatctcagcggtctctcagtattccaagcaatagacatccctgccgtcagaatgaggaagttgctctatttccgcacttacaatccttcttgtgaatcccacagccctggtttggcctttcctcaaatccatctttctttatctcagctctctggtggccgagtcagttatttggtgaatggctgccaaatcactcaccttcccagcatcctcttggagccgctcagcaggatcctccctcgctggttgctgtcaggatggaggctgaggcgggtgtccagggaggccagcgtctctggcacttatcttccttgagtaaagaaaccaccacaaacccctagagagcctcagatgaacatctggataaatattcagtttctgatgcttcatttgaatctcgggccgtccttactaaatcacactgaacttcatttaaacccatgcaaatagaaaaagttcctgagttttccccaataacaacaaaacccaccataattcagtccactcttccgctttcaaaaacttgctctcagtgtagcatgtgatctagcagggctctaagcatggtgcctgggaatatagctccaacatccgggtttacccgggccttaatgcctgggtagtgcttccgtgtcagacatcatgttaaggtgggttttgttatctttgctttccaggctcagggataaaatatcctgcccagattcacagcccttgccttgaaagtgtttcagtgaaattaacgaagtggaagtgaaaacaggtgatcacagtcacaaaatggctaggtagatcttgttcacacctagccatcattctgctcctgatttcttatgaatctaagtcagaggagggctgaggacagggttcagtgacagagcacttgcctcacatgtaggagacaatcagttacacacacacacacacacacacacacacacacacacacacacacacacaccacatacaaaaaaaggaaaaggaagaaagatagataattagtctttgactaaaaaggtcttgatattatgtcaagaacccatataattgaaaaaggcccttgttctgcctgctccttgtgtctgagctgtctgctttgtaatggccatgtgactgcccttctggtttcaggttttgttttgttttgttttgttttttaagatttatttgggggctgtcagagccatgaagctggggttacaggcagttgtgagctgccttacaaggatcccgaaaaccaaacctgggtcccctgcagaagtagcgagtactgttgatcacccagccatctctccaacagtctgatttcatctcttttgacaggtcaggttactgcttacaaaggaagaagggatcttgtctctttgtcttacttataccatgagaggaggaatttgtatgtctcatacacaggctgccatgttctaatctaggggggctctgccacatggcagaactgaaaatgggtttgctaagctgcaatctggagagcctcttccagaccagggttttccaaagtgctcttctgcagcccccgtgacgctcggcatgactgagcaggtacccaggggacaagctattcttgtatttgcaggtttgatacttgctcaaaccctcactggggcccgatacctcacttgatagtcatctgtctattagagtagcatcctctttctgtaaggtcaaggtcaggcaatggctgggcagggccttagagagccgtgtagtgtccagcgtcaattctcagagtcttcactcgctatttggagttggtggccttttcttcatgtatttgttctttttctgtgagcaggtcctctgtgaggtcttgcaaacacaaacaataaacttccttcttagccctgaggaaagaggcataaggaggaaaaagccacaaagagccaataaagaagatggagaaaagggtgtggcctggagaggtttggggtactaagtgccaggttcacaagaggtctgacgtttaggccttaaggtttgagtccagcggacatgaaggaggatgtgcttatgtgaggaaaccggtttatgcgagttagcctgaaaggtcatggtgtattctaacagtgggagagcttagttgtgcgtgaccgaagcgtaagcactcataggcttgggtgcccacagagcaggctgaggccatgcgtgtaaaggattctttctgtcagcagggttgaagtctcagctttcctgtgatgggcagtcaactgggcctttaaacatacatgagtttggatctttaaaaaaccacccctggtggcaactggatgaaacctgcttagcccaggagcccaggagggggacaagcttaccccaggcaggtggcaagtccacgtccagcccaggcagaggtgcttgaacgtggccagacaaatgtgcatttgagcatccggcttgatggctacgttctcagactatcttagtgcaaggatattgaatttccctagacctttagataacactaagacacagattaattctctattttgcatttagtaatgtagaaaatgaatccaaaagagtcggctatcaaccagcaggtacagctctgggacaaagagcctccccaccccacctccctttgcagaacggtgtttctctacatttacccaccacacccccaaggttgccccttgtagagaagcctggtgagagggtgaagaaggacactttgctttttggatcagcgggaggaggaggtcttggggaagcctgggctacacagcaaagccactggactgtctgggggagggaggtcctgagaatcaatgttgtcatggctccattttaatttttatcagctggatacagatgaggtgtcagtttcatagacttgatgtttttgctcagatttttggctaactgatgcttttccatggtttctgacagttatttttatttgataatgaataataaagtgagatttgcagtctacatctgacagcatttgttttattttgacagttcttttctagacagcaaaggttttataattaggttttgtgtctgccaaaatgttgctgaaaggaaaaaaaaaaaaaagaacatttctctggaaaaaaaagtttcatagtttccagcctgcaaagctggaaccatcttattttgatttggaagcttttgcaaaagtcagtcaggaaattaaaccaaattttcttttgaaaatgaattcttatcaggagaaaattaaccctggctatgtagagatttaggagggagaattagaaggggtatgcttgaagtatggtatttcaatagtccttgtaaaaatcttcatctggatggatataggaaactcccttttctactgttttatgagagcacatgcattcttgcagtgtagaggtgccacccccagggggcgctgaagcctacaccactccaccacccccacccccaccaccccacccccccccccccagcacatatggaagaatcaggtggaaatcataggtgtggcaattgacaatactttctgcttaaagcactcttgaaaagctgacagaggaagccatgttgctgaccggagctagggaggcttatcattgctaatggcagaaacagcgtggcgcgataatcacagaaacagtcctactactcactgccttggcccctggccgactggtgcgagttcctgcagtagcggcagtggccggattcgatttacaatgttttcctctctgactcactccttcagactacttacgatcagatagatcagatcccagacacagccgcccttgtccccaccacctctgatctccaccgctaccaccatccagtactttccattgagcacaagtatgtgggaccgataaccacatagtaactagtatttcaaagaacggtgtctgcttaaaaaagagacaacagcctcgtctgtggtactgtggcacttctgtttacagcgtgtagacagctgagcaaaacaggatctgtgctgccccagccattcgtggcaccaggttataagtattcccttcttgatcattttttaaaaatagtttatttcttgagcttatagtataagtacatcatttctcccctccctttcctcactccaaactcttccttatacccctcctcgctctcgcaaattcatggcctcctttttcattatgttttatgcatatatgtatatacatatatactcttaaatatataaatacacttccagtctgtatagtgttgtttgtatgtatgttttgggggatgatcacttagggtttgatagccagctggggtcctcttcactgaagaagtctatttctcccactctcagtactcctcggcttcgagtgtattgttgagcacatgtggggctccttctttgaagtgttgatgtattggctatagagtctgacactctgagtattgaaggtgatttggaatgtgtgttttataaacttgcatgagtgattgaaccttgagtttggggttgggagaaaatgcaatacgggatgcatagaggtgggtaaggggttcagtgccctgacagcttttatagaggcctggggcttggtttcaggaattcacatagcacctgactactgcttataactccagctcccagagacccagtgctaccttctgacctctgcaggcacctgcacacatgtgcacatgaactcacagaagaacacacacataaatattgaaagaaatcaatggagtttaaagaaaaagtcatatacacctttgatatcaaattatgagatccattgtcaccaggcacatgcagaagagatcttaccttcatctagcctaacctaagacccctctacactcttctctgtgaagcaaagaaaggagcatgtgtcagagactgcatgagaagcctctgtgataatggatcctaaacatcttttataatagcaataaaagaggcccctggaagtgactctcctccctctgtctcatgggaggagtgcattagctctgctaggctgatgatgttgcttataccttgcttagggaaatgaagctcttttaaaagcccacactacactaggaatgtcaggccctggcactataaggcagagactggagctcagaagtcctcactagatgcctagcttttccattctcagctacttcctcctccttctcctcctcctcctctatcctcttcttcctcctcttcttcttcctcctcttcttcctcttcctcctcctcttcttcctcttcctcctcctcttcttcatcctcttcttcctcttcctcctcctcctcttcttattcctcctcttccttctcctcttcttcctccccctcttcctcctcttcttcctcctcctcttcttcctcttcctcctcctcttcttattcttcctcttcctcctcctcttcttcctcctcctcttcctccttctcctcctctttctcctcttcctcctcttctccatttcacaagatcattataatctagacttttggaaatagctgtggatatgataatagtcacaactatttattgaacactcaggaattaggagccttggcaaaaataatcctaaatggtataatgctgtgggaaataaaataaaaaataaagaactcagcaagctcctgctcttgttccgggcacctctctaccttgatggtctggctggccatgcactggtgggcaatggctgacctgtttttacctctgactcagagctccaaaatctttccatccagctctctaggttcccatagatgggtggttaccacaccagccccatgcttcaaagccctgtgacctttgttgcacctcaggcaaacccacactttgccactgtccctttctctcttgaacccagatgagcctctgcatgaaggaaaatggaacacaatcgctgggtgcaacaactaaaatcctaacttgtaagccttattaaatttaaatcaggtggcaaatcccaatggatccacctttgaaactgggagacactcataattacatcttgtcctcatgctatccctgtccaaagaggacctaactctctcctgcttcctcttttcctctgtccaacctagaagtccctcctatttgcccagtgactggctcctgtatttattagatgattggttcataagaacagcaccagtcatatccacaaaagtataattttattctaaccttaaaacaggaggaagaaattatagtcttcacaaggaagatggagaaactgaggtagcatgctgtccctggtcacccagtagtgagtagctgcccttagctgtcagttatgtctctgtctaatcttaggctttggaatcttgtgaaatccaagtggtacctgatgttgagttagtacttaaacgttttgagttattgttttccatagacaccctgtgctgtattatagagtcctctgtattcaatgcttagggctctgtttcagtccactatgtccaccatggtctgaaaaatagtaagtggaaacttacaaaataaatagcttccaaatttttgtttttgtttttgttttttttcaagacagggtttctctgtatagccctggctgtcctggaactcactttgtagaccaggctggcctcgaactcagaaatccgcctgcctctgcctcccaagtgctgggattaaaggcgtgtgccaccacgcccggcagcttccaagttttaaactgcacttccttctgcatggaaacttgtagtgcaatgcagtcttctgtcccactggtatgtggaatgttccttcatgcacatatagtgtggtaaccaggtacacaagagcaaccacaggcacaaagctttgagattgggtctttctgtatcatctaggctgctctcaaatgcctggactgagaaacatcttccttcctcagctaggacaacagcctttgccactgaacacttttaaaataacttttacaacagtatactataattgttctatttcattgttattgttgttgatagtgactgtgcctaacttagaaaccatactttatgcggcaggagaaatgggtcagcagttaagaacactggctgctcttccagagaaactgggttcagttcccagtccccacatggtggctcacaggcatgcacatgttgcacagacatacatgcagatgaaacacccatacatataaaaataaaaaataaaaattaaaggaaaataaattggactttattataggtgtatgtataggaaaaaaacagagtgtggttccccgggtttcaggtatccacaggatgtcttagcatccccaaggacaagagagttctgtgtggaatgttctatggagcaagttagtcctactaccctcttatgattcacttgaacaatggtggttttgaaaagtaatgcttaagtataatatgcatgcacataaaatttttgcatatatttgcatatctaagtatttgtatgaagttaccttagcacctgggtactttggaaagaaatatgattctacaaatttggaacacaagaaataccactgcttcttctctatagtccaaactcagtgcttagtcctgagccctcacctggctcataagagaagtgaagcccttccctgccttccctggtgtgctgtgaataaagtttcatctcgccaacctgcagagaaggaagggactgggcccacttctcctcccagctgccctgtttgtaggctttgaagaagccgttgcctttcccaattaagaaagggctctggttactagagaatgggttgataattcagacaccagtttcagtgctagaagttttcttccagggctctgtctctgtctctgtctctgtctctgtctctgtctctgtctctgtctctctctctctctctctctgtgtgtgtgtgtgtgtgtgtgtgtgtgtgtgtgtgtgtgtgtgtgtgtgtagctctggctatcctggaactcactgtgtagactaggctgatctagatctcaaagatccacctgtgtctgtcttcagagtgctgggattcaaggcatgtgtcaccatgctcagtgctccaagacaaatcttaaaaggtctgctgtcctcttctgaaggagcattgggtcaccaagtgaggcgcccctgagttttctcctgagctgtgaaccccagttctcatctcctgcagcatgcattgttttccagtgcaggcacactcatccattactttgcccaagcttattcacgctggaactcatagaggattaaaggtcttttatcagttacatgtcgtgttggagcctggttatctctggcactggagcacagtatccagtgggagaggagtagagagctagaggcaggggagattttcatcatcttcttcgagaaccatttaacaagagtttcgtggaaacctatccttgaatgcactctaaaaggtaaaacagctggaaagtataccatgcctcactttttagagtctggacactcttaggcaaagtccttgaaaccctgactaccatttgaaaagatggggaggcaagacagggtcatgaataatcaaggagttaacatccagaaagatacttcagcctttaagattgctgggggaggggcatgctggagagatggctcaaatgttgaaagtcttgaatgctcctcctgaggacctgggttccattcccagcacccacatggcagctcagttctgaggagtctaacaccctcacacagacatacaggcaaaacgccaatgcacataaaataaaaatgaataaattatcactttaaaaaaagagcttgtactgctcttgctgaagacctagttacctttacacaaaaggtaactaggctgtggctcacaaccccctgcaaccccaggtctggaacttctaacctccacaggtgcctacattcagatgtccatacacacatacagacactcactcacatatagttcaagatgtttttaagagagcagtagcattgtcatcctccacccccaccccatccccagtaacagacagagcctcagagataaggagtttctatgaaagcagagagcattgcgatggaattgtggtttttttggtagccatgagcaattttaaagaggttggcacatggggtactttttgaatgaaaattgaggaagcttgctgagttattttgaagcaataacccttgacctaaaagatgagaagcaggaacagcactaggccaagattgacagttaccagccagaatttatatgcagaaactcgagggatctcctaccgttcgtatagcatacattatacgaagttatatatgtcataaaacttatgctaaaatatgtgttataaaacatatgctaacataatttagataaagatgctagattcaggtttccttccctgtactccaaagaagcaggtatcttccagcctccagggcacgcaccttccttccttgcaggacgcatttccacactgtgtgagtgaaccagaagcaggaccatctctacagctgagagcaggccctgctcctgtatggtgactctcatgctcaggggtgactgtttactgccttcacacttggctctaccccaagtccccaaagtcatcttgcttctttatgtatttcctggtttaatactttcctccctgacccgacaccacaggctggtgtttctgtcctggccatgaatggggcaagacatgaatatacctgattgtcttccacatgttgaagccatccagaggtttggttccattagtgcttcccccagccagatctacgagtgtggggagccaatcggtgatgtgcatgagttcccggctcttcacgcctttctgtttcagcaaggggcttgccacgaagcccgttcctcggatgcccccttcccacagggtccccttccttcctcggagtggccagttgttgcctccagacctagtctgcccaccgttatctgaaacacaggtaagccttggcatgagtacatgaaagttagcaaaatggcgtcacttgtgtcacaccatcacaggcaagaacataatgggtgaagctaaggttatgaaaagagggggctctcatgcgcatatgccatttgatgagaacgagctcagaggactttacagaaccacgatcttgagggggcaggggtggaagagggcatgttacctcacgatcttgaggggacaggggtggaagagggcatgttacctcacgatcttgagggggcaggggtggaagagggcatgttacctcacgatcttgagggggcaggggtggaagagggtatgttacctcacgatcttgagggggcaggggtggaagagggcatgttacctcacgatcttgagggggcaggggtggaagagggcatgttacctcacgatcttgagggggcaggggtggaagagggcatgttaccttattcaagaataatcccagtcatagctgtccctcttctctttaccgttcgtataatgtatgctatacgaagttatgtcgagtaactttaaataatgccaattatttaaagttatgtacataactataacggtcctaaggtagcgagctagcgtccagtttacacataaaatcacatgtactggaagcaaatgactattgctgtgcctttcagcctctttggtgtgctgagctcggtttggggtgtctggttggaagtcctccttgtggtcctccttgtgcatcttccacatttttctcagttcaaaataatggagtttttgggtttctatacataggaaatccacaatagaggacttagacgtaaggagccagggtgtacatggttcataaaaaggttgtgtgtatgtgtgctttgtgtctggggtggatttaaggctccagtattagcaatctgagaagataggtaaggagcatagatggtcttgtactatgagttttttacaactttttataaattgaaattatttccaaataaagtgttttgttttgttttgttttgttttgttttgttttgttttgttttgttttgttttaaatagaaaggtctggcagtatttggcctgaatttccacaagactagccagtgaatggaatcagatagtggcagtcttctttagttgagtgttgactttccaagttacctttttccagtgcccctggctgctttgccctctggccggctgcactcgccggtgaaacccaccacatccctagccatgttacccatgttcacagagttgtggtaccaacactgcacatgctctaaatgagccaatcccccactgctggccatattgcttcttttctttttagtattctcttttttaaaaatcattttaatgtctaaaaaatagggggatgctgggatatctccttaggtaaaggtgcttgctgcaagcctgacagcctgggtttgatccccaagacccatgtggtaaaagaggagagagagagacagctgacatgtatgtgcaggcggaaagtggccccaggaaggctgcccagcagggagtcagtgttaactcaggaatcttggaggggaatgtgtgttagccacgtggagttagggagtcctccagccatggagctacttagggcttcttaaaaataagtctctctctctctctgtgtctctgtctctgtctctgtctctctctctctctctctctctctctctctctctctctctgtgtgtgtgtgtatgtgtgtgtgtgtgtgtgtgtgtgtgtgtttcattcgggaatccaaaacatctggcaggtggtgagcacaccacacccccttgccggggagtttagagtggattaacaattattgcctcaacatcttatttaatatctttattaagagctgtttgaaaaaagtaggcttttaaaaagttctaaattttcattataaattaaaaattaatttcattttttaaaatctcaatttggtcatttctaaaacaatatacaaaagtacattgagaaaaacaagaccttgttgtattatatccaaaaagaaaaatctgtaagtaaagccaacggtaatgaaaaagccccgcaatacacacccaaaccaggcaatcctgattctctgccaacaggcagagagcaagcctgccactgcagccgggtcagtcctcatctcagggttgcacattctcttctcagtagatgatggtagagatgataaattgctctcttctctgtcctgctctgttcatccttgggaggggacaagctcacagctggtgggacagctgtctgtcacatttgcaccagggattgaagctgcagggagctgtgttactgacctcagggttcatcaccctggtttttcttgatctctctaggctgtctagagagggaagtgctacaatattatggtctgtaatccccagccatcgcagcgtatcctgtgacactggcttgcctggctgtaatctccaacgcttcagcctgcacagggaggttgccacatcaggtctctgtatgtagtaagtggatccttcacccgagttagggccaatatgctagtcctagacgtagagagtgccctgtaagccccaccccattccttttgtcatctttggcaatgctcgtggtatggaggaccatagatgtggataacataaagcagctaccatctgtgaccttatagagaaactctacccctgcctctctctgctgccccatctcccttctcaccctccacccaccctgcacacccttccatctcttgcttccacacacatggacccatgtgtgcattcacacgcattcaaatatgcacacacacacatactctctctctctctcttgcatgcacgcacttatgctcgagaccacacacatgcaaaaataagtaaagaaaatatgaacaaagctgcttggttctgatgtgctcacactgtggcatgctgggagcccattcagtttttatttttgctttgtttcatattagatatgtatactagttctgtggtacattttggtcattctgagaaaattcctttgttcctgatccatgggctgttattttgggtacagttcacatcattgatgtttatctatatcaccagattttaggtgataaacccatatttcattaagactacctcaatcaggagtgacctttaagagtctggtttctatgtgcagagaaattggcacaatatgtggtcaccatataactccaagttgccgtctttctttagcactagaatattctcttgctgatcaactccttaggtgctctgggttctttgggactgttaccaaaactatggccaagtatgatgtattgtaagtgggcttccttttctgctgttttttttttctaaagtcagattagtgtctacagtttaatcaaacatttccaggctcgctctgttaaaaatctagcaaattcgtattccataagtgaagaatgactttcaatcttatcattcttgaaaaaaacaacaacaacaaaaaaaaaaccaacaacaacaaaaatcctgcttctgcccctggctccatgtaagtgtttccacatcagtggcagcaggtacagagaaagtggccagtcacattggagttggatccaccttcccaacgcagcacaaacaagtggccagccaagtgtcagacacctgatctatgcccagagccgatggaagatttttttccagacatggaaaaatcatttttttaagacgatgttggttttttcagctctcagcagaggtgcatgaagtgggcatgacagtaatggatggaagtcagcaatggccagtgcagcagaagcccccgtctgtgtgtagacataaattcttcttaatcttgcttcaaatgttaaacttcaaagagaagtatcaagaaccctagggttgtcctaccttgttttctattgctgtgatataacacggtgaccaaaagggccttggggagaaaagggttgatttggtttctactcccagatcacgatcatcacagaggggatgcagggcaggagtgtgaagctgaaaccatgcctgctgcttaccaggtgctcactgaatcatgctttgcaagttttcattacagcccagcaccaccaccttagggatagtgctgcccacagtgggcctggctcttctgcatcaattcttaatggagacaattattgcgggaaatattaaaaaaatgaactggcacattcccttgctagtgctggcaactggcagggcacgaggctcctgctgggtgatctcactcggaggaggtccctctgcctgccatctctccagcggggaggttgggggagggcgagttcctctcactatcatgcaacaccccacacaccccatggtcagccatctcaataccttattacccagtagaatcaaaactcttaaagcttatgattatggttaactaatcagatttatgtatcaataaaaatcacaatttacaagatgccagtacaataattttagagccaattagtaataataaaagctttatcccaagtgtgctaaggattatgaaatcatcaggtcagcctccattctcctcccctttctctcctctgttccccttctctgcaactcttagctccgcctcccttttccctgtccaatcacaggcctcctctgcactaatgtaattggacgggaaaatcttgtgatagacaatagctatgccaggaggaattccgcaatggaaactttcctctcagctgactctaggctgtgccaggttgacagttaaagctcagcgggacagtgatgtcatttctctccctcccaggagcactcagcacttggacctgccaggttaagcagaggagacagaataccatgatggcaagtgtgtgcgaaagaggcagctgttcacttcatagcagccagtagaagaagagggcaagaccaagacatagctttcacatacacttactcagagactcgtgtcctccgctgaggccccaccctccagacatgcatcacttcccagtggtcgcatcagattttggatctgtcagtggattaaaccgtgtgtttaggtcagagccctcatgatttaatctttcctgaaaacactgaaaagtgtatgttactaatcttctagacatcttttttaatccaatcaagttcacagccagtcttcaagtttatcatcttctctcaaagcccaatcaccagttaagtacagatggtttgttttccatctcacactttggtacttttactgctaaaagttaaactctggtctcttaactaaactccttggacacatacaatatcatcgccgtagtgcagcaaccgtgaactagcaagcaattccagcatgcatgtcttttccaggtggctgtgactagttggtcatcctctttatgggtccccttcccatgccaatcatctttgattcaacgtcaagcatcacaaatttacgttggtgactgccagcctttctatattcttatgactcttcttgcttcggtcagaggtgtagttgtcagttcatttatttgagtgatgcttttctgaaaaatacattttaaaatttactctttgagaatttcatgtaaatacacagtgtattttgatcatgtctacccctcagttccccaaacttccaaatccccaccaccacatcctatctctcaatacttcatgtccttcctccttttatataatccattgagtacagttagttctgtctatatgctcaggggtgtagggccatctattgagcatggtcgacctaccaggagctgatgaaaactgacttttccttccttgacagtcattagttgccaaaagcaccccagctagagatgggttcttgtgagttcctccctgaccagtgctggaattttgactggcttgattttgtccatgtcttaggcaggtagccacacctgccacgagttcataaaagcaacactagttatgtccagaaaacactgcttcgtagcaggccttcccaatcgctgttcttccagtctttctgccctctcaatggtggtatatagacatttgagataagcctattgtgtaatagtggcatgaatgttgtggaggtaaccaactgctttctgattgggtttcaggcctaatccacaggacagaacttatacctagtactgtaagcatggccaagagcccatgactgacaagatcataaaccccgtgtgagaatctactactatcattttgctacatgatcatagtatcaaattgccttctaagtacttgtgatggtttatatatgctccactcaggcagtggcactattaagaggtgtggccttgttggagtaggtgtgtcactgtggagatgggcttaaccctcaatccagctgctcagaagcaagtattctgctagcaaccttcaaatgaaaatgtagaactcccagttcctcctgcaccatacctgcatggatgctgccatgctcccaccttgatgataatggactgaacctctgaacctgaaagccagccccaattaaatgttgttcttataagagtccccttggtcatcatttgtgttcacagaagtaaaaccctaactaagacagtacccatcttcatatccatagattagtgcagttctcagccctatcagagaagctgctttttctagtgatgggcagctaatgctaagtaacgcttttgtgacttaattaagcaggcttgggacagtacttactctggggccagttattccctagcacagagtcaaagccttctgtgcccattgctggatgagctatgagtacttccggtctgggacaccacgagctgttctcacctggtgttgacatggtccctttcaacctttcagatgggtttctcctggtagtaagttgtagttaacaatactctaagggatcctctgcaaagttcctagattctacttatttagctttctcttctctggagctctcttccttggactctttgggctttgagctctgtgtctttaatttggggagtctgccaggccccctttcttcctttcttccgctagcacttagaaactccctcaggctggggtagttgcgtggcttagtttttcccacccatcaggcatcactgcctctgacagctgtctagtgttttgctttatacattctatctggtttttgtcctttgtttttgagttgtttaggaatgatagtaaataaatcccatttgcccatttctctgtcttagctaaaaacagaaataaccaataagaaatcgattgtgccctttatttcattgtgtctaccttactttccattttcatgagttctagtttctccctcccatagtaaaaggaggtacttttggtgttttagtcctttgaattctagacttggtccctggaccacactacatgttctggagaagatggtatattatgtagcaatcagttatagttcttgttttgctttacggtgaaatgtgagcatgttttactctgttggtgtcctggctggttttgtgtgtcaacacaagctggagttatcccagagaaaggcgcctcccttgaggaaatgcctccatgaggtccagctgtaagacattttctcaattagtgatcaaggcggggagggcccaggtagtcctgggttctataagaaagcaagctgagcaagccagaggaagcaagccagtaagcagcacctctcattggcctctgcatcagctcctgcctccaagttcctaccctatgtgagttcctgtcctgacttcctttggtgatgaacagcaatgtggaagtgtaagctgaataaaccctttcctccctaacttgccttttggtcatgatgttttgtgcaggaatagaaactctaagacaattggggtaacttttatttacctgtatgttactacaattgtcattttaattcttagctttgtcattttgtttaatgttctcctgatacctcatatttgttagcaatcttaatattttgagcagtttgtattttcttcaatcgctcaccaatatccttctgtcattcagtaattctcttatccataagggactccccgagcttgttcagccttaacctttctacttcctagatcgtctagctttattattaagtttgctatttctactttgtcagagcatgtaatatggaatactgtgttctcctagccacagttttgttccacaattagaccttcaatattacacttaatactagacagccatttctgaagcatccaccacaattgtcttttcattgaaagaattttcctcagataaatttctcaggattctttagattcttatatgcctatcagaaacatttttcataagcttaataattgaagaatatctcaaatgattaaaaaaaatcctttgtctcatactgtcttccctcgggttttaaaactgttatccgtgtctttgcttgtttcatatgttgctatggatcaatctaatttccacccaatttaattttcttggcaagggacaggtcctttcatttggaggcccaggagattgttattgtcactgttgtgacaaagactggttagttatgtctcagaggtgacccattctgggtcacagacaaagtaggttctttcagttatacatccaggcctttcattcaagatgtttacagttgggtttaaacactgtcttccactatttcattttcttcttcaggagctccagctgtacatttttggatcttctggcagtttttgtctgacctcttaaaaaattatcttctctttttatttctcttctctctctgccttcacatactttgagttactgtcatgtccctagtttctgagagtttttctttctgctgctgctgctgctgctgtttcttctttctttctttctttctttctttctttctttctttctttccttccttccttccttctttcttcctcaaaaagttgcagatacattttttaaaagaattatttacttattttatgtatatgagtagctgtcttcagacacaccagaagagggcatcggatcccatcaccatatggttgctgggaattgaactcaggacccctggaagagcagccagtgctcttaaccactgagccatctctccagcaccttcttttttctctagatagtgcatgcactgtggtcctgctgcctgagacccactgtgtagttgatgctgggttcaagcaggctacggtaatgctacttcagctctggattataggactgagcaccatgctagtcttgcttattgatttcttcatctcattttcttcccttaggtcagtacctaaggtcagtacttagggattttgaatttccagttcctgatgttttttgtgtttaattctactcagaaggttgagactcgatactacagttttcatctatccacagttactgaattaattatgtttgcttcatgctgaaataccatgtgacagttttcctctgattgtgtctttctttccatagtaggaaagtagtttccatttgccaaatgttttgaattctcgttgctgtatctttttcaatttccctggaaactcgggactcttatctgtcgccttgtccttgttcgggtgtgtttgctttttttttcctagacctgcgatagtagaccatccactggggtgggatttgggtactttaatttcttcctcaattcaaaagaaatctcagagtgaagtgtgtcggctcatacctgtagtctcagccctgtgacaggagaccactggcacgctgaaggcgaactgggctgcagttttagaacagcctcagctgcagaggaggagcccacttacaaactccgggagaaaaagagaagaaaatcgcctgactgtggcagagccagatggtttctgtgatgatgctgcctccttgccgtggtttgccctcccttgaactgctgatgggctgactgacgagtagcagaacctgttttccagccacttctacctttgctatccgtcgtctaagaagataccgttcttctctcttggtggcgtgggccatcactgagatctttgcctacactctcaagccacctttctctccaactacccaaaggcccctatcccagcggtgtctgggcagaaccacatccgagcctctgttccagcccctgccatttctcacccagagaaacacaggttgaaccctagcttagactgtatccccccccaacacacacagcagtgtcagcagcccacagtgacaaggaagaaacaaggcttaacaccccagttctttttggcatcccagcagtgagacagagatgcagaaaacagtagcattaattgactgttttgattcccttctatattaccgtgtctgtgctcgcagcatgctgtactttaagggtctttccccatagtgtagtctgtatctcattctaggaagctacatggcacaccatcttgctcttttgccatttgctgcctgtatggatatcaacaagggagccaatgaaaatggacacagagctaccatctctgagaacagtcagtgggtgatcactgcccgtttttgtcttgtgtagacccttcttggtgaggctggaggtagataaagtggatgcctttttaaaaaactttctttggatcaggttttgatccttattgtagatccaaaactatgctgttagtctcgccagcatggcgttgctaacgtcccctcaggacactggcagcgggcctcctgcctcctgccaacactgctgccagctctcatcttctgaaaattcttcatagtaaaatagaaattggaagaagggcttcttatcccctatggcttgccttgctactaacccaagagtctggcccattgcattttagtaatcaatacgaaaagagttattaagagttttgagattatgatgttttgagaattactttttccttgagtattctactttaaaaacttaataagctccttaataaaaataaatagtaatgcaaaatatctccccatcctctagcaaataaattcaacttacatttccttaccagattttgtctaaattttataatccccatgcctaacctcttttcttatggtaatgtttgcatgttacagggattttcaaggaacgtgggtcttacatagagccaatacccacccacccatccacaagcagtgaataaaatacgtcctgttagtgatttccccagagtaatagtttcaaatgtgtactttgtggtcagctctggttcaaatctcatctcctgtgtttattattcatgtgctgactaaaatctccaggcatcaatttcatcgtgcgccagacgtgacccagtctgggaatggagctcagggggacagcagttgcctagcacacagtaggcagttgcctagcacacagtaggaaggctctgggttcaatccatagctctgcaaaaatccggttagttaaaataatgtgtgagcacagcggtaccatcttgttagcactcacagcagagtccaggagaaatgtatgagaacacagcacagggcctgggtcgggaggagtttaggagctgctgaggaaggtgtccgagctcgcacatgcgtgggaattacccctgcaggactcttcgtgtttttagcagcaactagtttgggttggtttgtttgtttccttcaaactttctcagaaactcttgatatttccttttctaggatgtgtcttttgtgacagatagtaagcatttagcaataaaaggaggagtaatataatcacatctcgttttttgtgtgggaaggatttgctgtcttacccttcaacatggagcacaatggctgtcaaaagctggggactttgtaaatggatactgatgtgacctcaaggtctgaaactctggagtcctataatgcattaagacaggtggtcactgggcaaggcctcttcatcctatgtcaaataaagctaatatagaaaatatgaactttaaggtgagtttaaatggaaatattgaaaagtcaccaacgacagcagcattttattttgtcagtcatatgagagaaaaaatggagaaaataaatggcatgtttgttaatttgcggttaaaggttagggtttctgatgccgtgataaaacaccatgaccagaaagaagcaagcttgggagggaaggatttgtttctcttatacttccacttcttggtccattattgaaggaagctggaggcaggaagtctgatgcagaggccatggtgcctactggcttgttctccgtggcttgctcatcctgctttcttaggacacccaggatccagagcctatgggtggcaccactcacactgaactgggcccacagcagtcattaatcaagacaaggtctctcaggctttcttcagacaaaccggcagggcattttctcaattgaggttctcttatcccaaatgactctagcctctgtcaagttgacatgaagctagcctgcataaaggtatttgtttatggaatcataaaagtaagctagatgtatggcataatacattcaaaagatcctggggctataggtaaacatttcactatggagacagtatagcattgaggttaggagtggagattaggaaatccatcagcctgagtttcaaacccagttccaacatctgctcaaacaggggccatgttagtaactgtcataattaaggtttccattgctgtgaagagacactatgaccatggcaactcttatgaaggaagacattcagttggggttggcttatagatcagaggtttagtccattatcatcatggtgggaagcatggtggtgtgcaggcagatatggtacaagagaagttactgagagttctatgtcatgatccataggcagcagtattctacactgggcatagtttgaacataggataccccaaagcctacacaacagtgacacaattcctccaacaaggccacacctactccaacaaggtcacacctcctaatagtgcccctccctatgggccaagcattcaaacacatgagtctttgtgggccatacctatccaaactaccactacctaaccaatcgccctagccaaggttgggtctgtggtattgaaaattaaataagattaatatatgtcaagtattttaaacttttataagtttgattgtatttattattattaataataataattattattattttgcgtgtgtgtgtgtgtgtacactcacatacatatatgaacgccataagacagcattcaataccatggaactggagttacaggtggttgagagctacccagtctgggtgctagaaactaaatatgagacctctgcaagattagcaagcagtcttaactgctgagcaatctcccctggggcaagcattttaaagtctgtatcagagtttctagttttcaatcaagccttgccaaacaatcaagagcctaagctagccctagtctgcttgttcagggcatggatgagacatcccctgtgtggttgaggggtgtcctcagtggttagaggtaaacaaagtggttctgtttttttcttaccttggctctctatttcctgctgtggctggccattctcacaggccctgaagcggtgagcacagcacagtcatgttgtctgagctccactgtaataaaagcaaccattgcttggagtcacataagatcaggtgtatgattaaaatatgtttttttcccacaaacatcagcagccatgattgaaagatgggatttcccagatggtattcatagcctgttggaggcaatattacttaagcagctaaactttcactacctgttcgaatgcctccaaataaggaaaagtcataggtaggtcctggagtgatggctcaactacaaagtgcaccgacctctcttccagaggtcctgagttcaattcccagcaatcacgtggtgttatagacattttggggctggagagatggttgagtggttaaaagcactgactgttcttccagaggttctgagttcaattcccaacaaccacatggtggctcacaaccatctgtaatggaatctgatgccctcttctggtgtgtgtctgaagacagctacagtgtactcatataaataaaaataaataaataatattttttaaaagtagtttaaaaaatttcataggtagcagattgcatctcatctttttaactgtggagtttgtaatgagtaggctgaattaacatgatgtgttaacatgataaatgggaggtgctctctcatacaagagagaacattacatgtcctagaaattaaagttaactactatctgactctattttataaacagaatgcagaagttatggttcagcatctattgacttttatctgtgactcagaatatggtcttgggtcattggttattttctcttacaaatattcactctctattatttcccagacaaaatgtataaggcttgcagaagtctttgagatttctcagttcaccaccctcccatcccaggcccccatccacagatccacacccatgttcaagaaacgcacgtgtgcttggcctctagtctctactgaaatcaatgcgatggattttagattgggttttacttttatgaaccgaagtcttgttatgtagctcaggctagcctgaaactcatggtctttcagcttcagactcttgagctactaggattataggcacatattctaccacacccatcaatgccttcctgaaatgatgctgtttaaagagacagtccttttaatgcacctgtactgataatctactttgtaactatggatagaaattacacagcccctcccaccacctatcctcgcccctgttttctcttcctttctaggaatttcctttttcctatcttttaactcctcccaatcctaagcattgagaccctgaaccctttactgaaggcaaaagaagtgaattcagcaatggaacttgagactgtgtggccctaaagctgttgcaatttctaactacagataaaggcaatcttgttcaaagacctgcatggagacttcaagactcctgagagggaaagcacacttgatagattataaataggtagaatacaactaaatcccaaatattaactaatgcattctaacactacccatatattgtatttgttgaaatggctaattgtccggtctttaacctcttaaacacttgagcgcctgagtttttgcctcgttactgttttaagtgttgtatttgtgccatcctgaacatttccacagacagtacatttattgtggttgttattgctgctgctgctgttgatgtgggggaatgttagttcagggtgacctcaaactcagatttctcctcctcctcctcctcctcctcctcctcctcctcctcctcctcctcctcctcctcctcctcctcctcctcttcttcttcttctgctccttcttcttcttcttcttcttcttcttcttcttcttcttcttcttcttcttcttcttcttcttcttcttcttcttcttcttcctcttttgttttttttgagacagggtttctttgtgtagccctggctccggctgtcctggaacttactctgtagaccaggctggcctcaaactcagaaatccccctgtctctgcctcccaagtgctgggattaaaagtgtgtgccaccactgcctggtgaatactggcaaagcaaatgatatcgccatttagctgatatcagagtttgacgtgtacaagtaacagtcttgttaagaagctatgggatgccagggcatcgggcatacttttctaaactattgttgaaatgtttctgaacatttttaaataatcatctgtaggtctctaaaatttatccctttccaaagggaattattacatggtgagacatatatgacttattatatgtcttgagattttacatggttttaagatgatgcaacccaagatttatattttactcaattctcataaatgtcatttaaaaaaaaataatctggagtcactaagtatatttggcattgttttaagtacttgtcacatgttgtattttcctggcatgtcttttaaccacatccccactaaaatatcttgattagcatattttaaaagtggaatcataacacactgtgacagtcggggatttggagatcctattggcatcatgagaattctgcctgggaagaattttcccaaggaatagtcaacaagggttgtccacaacctccaggattcagaaagtcacctcatcttactacgttgataagatgtatctactacagaattattagaaaagtatcctttacttattcatgcctaatattttgggatagtcagggcagctatggttttaaggatgagtagtcacacagcaatggagaacctgaagtttagaggagttctttcatcattcctgacttcttttgaattgaatgaacagttcacattttctgtagtcctgaaaacatagttttccctaaaaacatataaattttacttggttatatcttaattaaatcaatagttctcttctgaaaccaatgcagacatactgcttttgttctgacacccctcctgactttcttattattgttattcaagtttgggttttttttctgcacaagacaccaccaccaacaacaacaatctgttcatgctttcaaagatttattactactactattattattattattatttattattattattattattattattattattattattattattattgtataagtatgtgcacatgagtgaaggcactcacagaggcaatgccttggagctagacttaaagacctgacacggttgctgggaattgaacccaggtcctctggaggagcagtgcatgctcatagttgctggacctcctctccagcccctgttcatgtttcctttgcacatcttcccttccttacattcagagcctctgggaccaaacccagctaggactgtcagtctccagaatctataagtaggcagttaggtgtttgggggagaaaaaggaaagactggaatctaaggagatatgccttgctctcaacaccaactcatcttcaatgttggccctaggaactaaggactggggacatcctacatgagtattgtccctaaagcctaggtgtgtctttaagttatttgcctctactctctagtgggggtatgttatgggagtaaagagcaatgaactcttgtaagctactctcattaaatatgtctgggttgtatccttcctgctaggggtgtgtgtgtgtgtgtgtgtgtgtgtgtgtgtatgtgtgtgtgcatgaaattaacattatttagcaaacaatggcaatgatagttgaagttcttttgatttggttttaaatttattaattccattttaatattttcttacttgaaaaataccaagttgcagatcacactttttgaagttttgctgtccttgaactctaaaataactactataaacaactagctgtgtgtttgggtgtagacattgggcggtctgggaaatgtgtcttctcggttatttaagagcttcatcatgtactcacgctgtgtacaagtcctgtgatggtaacagcatttggtgccagcagtgtacagcaggggtcctggatcagcacgtatccccagctgccttctgatggtcaacactgatccacagtttccggaaggttgagacaatctgaccagttttttagaaaacactgctttcaaagttacacagcccaatactctttcagtaacttgtaagataatttctctcctgtctaaatgacatcaatttgttctttgttcaatatcaatttgttcaatatagccaatatgttcatatgtggctatggctatatgtgctttcaaaaaaagttttaaaggcatgtgtttaactcatatctctattaaatctgtgatccaggcatggtggcacaagcatacaaccctagaacttctgcaggaagatcaggagctagaggccagcctttgctatatagcaagttccaagtcagcctgggccacaggagacgctgactcaattaattaatcagttaattaattaattaaaaatagatctgtgatcctttcggctgcaagaaagatataaagatcaagacatagctgatgttgaggccactacatttccacttttggtcacctttctgaaagatgttcttcatttcttcccatatagtcagtatgacgtcattacagatgacttgagtcctaagcctcttctataaagaatggtcgcattgaaatatagccacaatgtcatcctatgtctgatgctgacatttgtatgtggggttttctgtgattattataatatagacaaatgacctcatgatgatccactagccacagtggcagatttgttcttttctataggcactacgaaaggaagtcataaaataatgcatacccatttgagaagaatgtaacacttcctaaaaactgttttccagtgaaggacacccatccccgagagtggagctgctacacaacatcgatcaggacttttttgatggcttgccatgtgagtacccagccattgccgccatgttaattgtttggtttctggttttagtagatactgtaactctagccggaattgcaattatgacaaacgtttctccctgatacttgtgctagtaatctcatggtgacatcagtattcttcgacgtcagtaaactctggctctgccatttgctggctgtatggagcaaagcccacaagacccccgaggcccttttccaaaaccaatctcatgtcattgtctatgtcacctggaagttccagaacattttcccagagaattcaccatcaaacaaaccactgtccagctctggggttttgtggggcaccagagcatctgactggattggcaggatgctgacacacccaccgaacctcacagtgtgagcttcctaacagtcctacaatcattccgcttcattctgcccactgcctaccagagccttgaccattccttggggatgcggtgacgtcacctgcactcatgtgaggttcataccagctccctcccgcactgtactgccttggtaaactctctttacttcttagaccccactcttcaggcattcctgctcagagggttttcctgtctgtgtcacttgtcaccaagctccctttcacctctccttgtcatagtctcgtccagcattactgtcctgtttgccatctcaaagcatatggttggttataccatccctagactctaaatacctgtttcctgccttcctgcctctctgaagtttccagagcatcccagaagccatgacaaacagctgccccttccttagtgtcccttagtgcctctgaataacatcagtcacatcgtctagttgggcatgcacttctcactgacatgaaggcctgggtgaccctcatcagttagcatttgtcaagtgctcactgctcgttatttgattacagaggagacaattggaagagagattagatgcaattaaaaataggaaatttccaggaaaatgggtgaatctggaaattattatattaagcaaggcaacccagagtcatatgatggcatgttctctttcatatgcagatcctagcttttaatgtttatatgaatatatgtgagtatgggttctagggtataaaactggaaagaggaccgtgaaaggggaggaagggttatgaaagggggatgagaaccatgaaaggtgttaggtgagaggggaagagaggaatggacagaagaagcaaatgacgtttgaaaatgtcataggaaacctaatactaagtatgctagttttaaaaagctaaacactaccaccaccacacccaaccggatagattaaaggaaggaaaggaaaataccctggtaacaggcaagaaatgtttcttgtattggagtgaacttacactacaggtgtaagagtagggttagacacgggagagcaccagagtagtctagattggtgccgcgctgtccgctgagctataggtggccactgagtacttgaaatgaagctaatcatgggtggaggtggcagatctaggtataaaatgcatatccagctttgaggactagctgtgcatatgatgcatacgtgtcggaatggcagtactttgacttgttaagttgaacatattactgatgctttatctgtgttttttccctttcttaaagcatgactggtggaaacattttaattatgtatgtgacatgcattagagctgttggtcttgaaggattttgtagaaggtcctggggaataagcttgtcagctgtacagagactctgtggttagtctctgtgagcctacaatgagtcatataaccctgctccaggatgtccaaaatgtgtttctcatatagtggctgtggactgtcttcatcttcgaaatccttgcacaaaaacaaacaaaaccctttgatctttacactcatagtgtagattggctttagaagtgacaacctgggaccagattcttacgtggccatctggccatcgtagccctgtttgaagcaaggttcttatggtaaccatatatcccttttggctgtcctccctaaaaatactcctatcaaaataacaatataggcaagaggttagtaagggtgtggaagtcaggacagagaactccacccctctgttgtaaggatgtttacagtgtattgtttagtggatgtgccaagccccattattgtggtcgttaattcagggacactttttgtccttggttgtcctttgtgcctcctcctatagagaaacctactcaatgttgggacctaccaacttgggaccttacaacaacatagagccaactgtttcatatgagggaagtggtctctgttgtctgtgtctacagggggcttcatgcccacctcctcctcacacagagcaacactgcagattctttctgagtcactccaggctgctgtgagggaaacatcggaaaaaagaaaaagaaaatactgtctttagggcctgctgctttttaccatgaaaacacaaaactactttctttcctatgcagtgaggttttgggtggggggagttggggggtgggtatagggaaaaagtcaatctaggtctaagaaaatattaacttagagccaacccaagtctagtgtcttccagactggccattagacttaggagagagtaggcaaggattagcttagctaaccctgctggggtacacgtcttaatgagcagtcatgttgccataggcacagtcacaagagaatgaacagaaattaaacccttagaagctttgtaaatcacaggctagtttgtattaataggtggttttgttcttgctacaccctgttcgcctctctgagccctgtcctgtgcctctctgagccctgtcccatacacgtccttttccttttccaagtgtcacctcacatgaatgacatgaacaggccctgagtgtttcccagagagccctgccttctatggcccccccacatccccgcaaaagctggctcttagatttatcagttacaccttccaccctattttcagggtagagggaatatccagggcccttttgttaccaggaaaactggggttccctctccttaggctcttagtctcattaataaaaacagactcagacagaagctcagagaccattttattaaaattttgaaaggaaaacaatagggcactctagctgtaaattttccgcagctggtgaatggaggtagatggagcaaaacagagaggaaaagccatagcctctgagttaagtaaggtctgcgaaagctggcatgtttgaaagcagagggtggcagacatctgcctgacagaagagttggggttcagggcttcggagaatgggtgagaaagcagaagtccagggaacgcatgcttagacagggaaaacatgcctggacttttgaaaaaggggcacaggaaaagaaaggaaaattatactttttgagtttagaactccaaaagcaggcaagcttagggataaagatgtgcaagcgactgcctcggggaggggctctggggccgtgagtacatcagcatctcattagggggtaattattcctcccatctcctgagtgtgttactagatgcatcagctgtcctggggagtagatgctggccatgagagtgacaagcccagctggattaactcttaaagggaaagacagcatagtgcataatgttctcatctttgggcagcatcagaatgttaggtctccacttggccagagagaggtactccatccttttgactagaaggcctaagcggagaggcagttacaacattttcctttctagggttagcagaacagatgcggtccaaagccaaccatgagaaagaggtctatcctcggtggtctccaaggttactaatctctgcctgctcgacattccatactcgttcattatttattgaaggcgggctgaaatcggggaataaatctgaccacatgcacatccagaggtctgactccaaaactgtccatcaggagagattagggtctacctggaactcctgttatcgtcacacacagctttcagacagggtgctcactgagagcagttaagtgtggagcactcctgctttgtgtgccttgcctcaggacaggaccaaggacattcccctggagggcagactgcatacaaagcctagcatctcacgctttaccactatctttctagtagggtgacatagactcagtgtctttcccaggagtgagcagtagaagtaactagtgagagacttgaggaagtggcggtactgttcaggatgagctatgggaaagcctgggggtgtctgacaagttggggaaacagctatcatgctggatctgaatttagctctcatcgatccaaggactctcctgtgccagactccatgtttcgcagtaccatccagatcaaggaagaaccactatgctaacacagtttgcagttgccagactgatcttggctgttctgaggtgatagtgcccttaagctgaggatacatctcaccttggatgtcagttgtgatcaccagaattccagaataatccagttgtgtgatatatgcatatgaacttcacacacacatacacatatgctacagaagttagcacagcacctgccatgagggtccactctgtgagtggctttgtgtagggctgttagaaccaacctcacatagaaggcctcctgtctttgggcatcacaaagacatgtaacttctgctagcgacaatggtgggaacggggctcagttccctctcctccctcacgtggacattttctctggtacagctgccacatctgcttgaggtccaagacttatccagtctcaaatgtgtcctaatctgaatataaaatagcctggctggcagaaggtcactctacgcctgtgcctttgaaggttagaaaccaccctgtgtgtggctgtagctccctcttggctttcttcatgccaccatctaaacagcacctccctgacctgcctctgagaccacgaggccaggctcatgcaggcaaactgttgtgggccaaaccaaactctgtgaacagaactaaactttactccctaagttgtttctgtcaggtattgtcatagcaatagctctctcacgctctctctctctctctctctctctctctctctctctctctctctcccttttcccctcccccctcttctctctctccctctcctcctcctcctccttctccttgtccttgtccttccccttccccttccccttccccttccccttccccttccccttccccttccccttccccttccccttccccttccccttccccttccccttccccttccccttccccttccccttccccttctgttcttcttcttcttcttcttcttcttcttcttcttcttcttcttcttcttcttcttcttcttcttcttcttcttcttctttttctctctctctctttctctctctctctctctctctctctctctctctctctctctctctctctctgatggccagttttctgtattggtcatttttctgacatggtgaccatatcatctgctggaaacaactcaaggaaggaaatttacttcggacgggtttccatcagggaagagacagggatgattgaggagctgttcatggctggaacaagcttaataagagcccgtcagggacatttcagattcaaagtgtcctgctgatagctccagagttcaggcctgttcgtttctgtgggcttctgaggagacggtgtttttttattttgttttgtttttctgtttaatgcatcagaacataccatgtattaccctgatcaggctaacccacttcccatccagagacatacgctctgagtagattagacatcacctgtatagcttgctcaatgcctgagtgtgtgatgggatgcacactggtaggtgagtgtgtgatgggatgcacactggtaggtgagtgtgttaccatcaactcacttcaataagaatgaccctgacccaggccaggatgatttcacccattctggttagctaaggagacatcccatctttctgcagggcgtggtaggattatgtaggataacaaagttctggaggcacctgggtagtcaggctgttctccacgttttctaacccagatggggaaactgaggttttagttccctcagagctgttatacaatggagctagaacctggcccttccctgctcacacatttccaaccatacagactgcaggcttctctcatttcctttccttcactggtttgatgggaaaagagctacttcagcaacagtcacctcgcctcaatgacagcatgttgggatgtgctatgcttatgcacgaatggagtatggtatgtttatgtacacagggggtgtggtatgtttaagtgaggctgggagaaaggctctcatagtgacaccagccttgctggcttcacatgtcatctgactctggatggtgatggcttctgactacagagctgaccctgagcacgctgctcatgccttggaccattacactgaaggagcaaagggacgagtgctgggctgggcagtaccagctcgtgcgaggtatagaattttggacttgggtttaagtagcaactttgactcatttcttgagagcctggagcctgagatgagttcttccactcatctgttttgtcaccaataaactgaggacagttacagcactgtcctataaatagatccatctgccagaaatagcagttacactggggctgctagggtgggggggaagctgcaatgtctactgcacatattgctacagttcttaaagatgtttccattcatttgtttattcattcattcattcattcattcgttcattcgtttaatgtgtatgtgctctgctgcatgccaaaagagtacaacagttgcccttatagatagtcttcagcccctatgtggttgctgaactcaggacctctggaagagtagccagtgctctttaccactgaaccaactcaccagccctctacaattgtatactctagagacgagcttgcttcacttccatagtcaaaaataatgtgttgaggctgagtttggaaagctacccaaggttctgtggagatcatgctgtctgccgagctgtgtcaatgggccgggcagtgtggacctaggctctcagctgtcagccgcagacccccaaaccctgccgtctcagttgagttctttctttctgcaggggacttatttcacagctcatcctcaggctcacaggacacatgctcacagtatttgtcatctgcagtttgtcatacttctcttgccatgggttgctctcagtgccctccctcacagagcccgggaacactttatttttctccgcttgagtttccagtggctcatggacttcctcccccactctggggatctcggctgcttgtttggaagagtggctttcttgatgccttgagcagccccacagctgcttgtcctgtctcacgtgttccacacagcacatctcaggtgacatccatcaaacctgcagctaactctccatcatgacctggctttcctcctgcgaaaacacagaaaccaaaccaaaaccacagcacttgaaaaatgctaactaatcctcaccatgaatcttggctgcacaaggctaacaaatcccatggccccagttttatgtttggagaaatcagggcagttggcgtcagaagacagaggctgatggaaaggttggagctagccctgtctctgggagttaggctgtttgaccaagggccagatgctacaccaaattcccttctgaacaacaatataactcttctttaactccattgcacttcattgctatagcagaacagctgggtatgttgggtaatggggacagctgtggctaaaggaggtatgaacacttggcttatagttgtggagatttatttaagcatgacgctgacatctgctcaggtctggtgagatccccattggctgtgtcatgggatgggtggcatctagaagtgcatgtgtgagggagtgaccaggtggtgatcctgaaagccagcgagagccaagtatgtctttactgactgacagtcaagaggggtatcaatccccaaaagcgcaacactgaccaaccgtggctgaatggtcttgcactaaagccccaccacctctcaccttcctgagactttcagcatgtgaaccctcgggaacacactcagatcagccagcacagtcattacactcagctgtagtagacaaacctattcacgggcgctggggaagttagcagaaagaactctttggttcctggggatgggaaatattattctgttacttactctgttgtcctggatttatgaacaacatggagtggcctagaagctagccagaggaaataagaacatacaacaagcttaaataaattcaaataatggacaaaggcaactgtggtgagatattatgagctctgtttgacgaatggccagtttccacagcctctgacatcattgctgtagatgcaggtgggcctgctcctaaaggctgcctgctgagagagcagcctgctcttcacctgggtaggctgctggggagaggggatcaccacaggaagtgaaggcaggagcaagcctgctcagggtagagagaaagcctgtaagaagggttgggccagcctcagccagtgggacttaggccagcaggctgtgggagctacctgatggctcttaggcaagatatctatgagagtgggaggattgaaacacagggaagttcgaagttagcagtaaaaaccctattagaacactctccggccaccataaaataaaccttgcaaatatcttagtatggcttttataattttctctttctcttgattttattcattaatagacacatacaataaacacattcttccaggattcagatcagaactttgaagttaatttttaattcaagcctctatgggcattaattttaaaatccttttatagcaattttatgaatggttgcatagggttgtatcatatgaaatgagcctaccacttcaacataataaaaagctttccttccgtggcttgagtcctacatttttttaaggatattttctcacaaaaatatggttatggacaccatgatgatcagcactgattgtcaacttgaaacactgaagagacaagcctcttcccatttctggaagggattatctagaagcgagtgcaggtaggagggctcgccccacccaccatagcatggggagaattggtttatgggctggcatcctgaactgaatgaaaaggagaaagtgagctgagcaagtgtgcgaacacacacacacacacacacacacacattcatcagctgtacgcgtgggacccctgaggtcctcatagccagggagagcaccgaccctctcaggtgatggaaggcactcactcacactgtggtacacgcacttgcacgcatgtgcatgcacacacattaaataataagtagtaaataaatggctttgtgttgtaaatgtaaaattttcattttgtagaattcttcacttcacatttaagcattcatcagtattctagtttgacagaggtttaatcatttatacttggctttttataacagtatttgtactgtttatagatgtttaatcatttactcttggctcttcggtatagagaatgaagtcaaagcagatctgcagatagagaacaacagcagcgactggggcttgccagccagcagtggcagataaacacagtagttttccatcatccctccctgtctgagggccgcctccaagtgcattgattattttttaggtgccttgtgttttattactggtgtcagaccttccttttatgtctgaattttgttagctagctggaggtacacagtgagtttgctttttatttttttattttattttattttattttattttattttattttctagagttaggagttgctaatgttgcaagtcagggcattcctgacctaaccccagccctgctgctgccttttagacatttagcagatacttggttttatctggtcagtatcttgttaagccggttcggtcatttgtgtgcccgggagagaactgtctttgatgatgtagtttgttcccgtcttttcatccttatgactttctctgagtttcgcctttcccttcgtctcattgcatagttagcgttgataatggtgatgtcgtgtacgcttgcctctgtctcagtctcagagagaagatgttcaaactttacaccattacctaggaagtttgttgtttccagacagggtttctctgtgcggtcctgggttcaaatcacagcaccatataaacctgttataatgagacatacctgttacttgagcatgcagaggcaacaggagtgagttcccagcagtgggttccatagtaaagacccactcttaaaaacagcacaacacaacagaatagtaacaacagcaacaacaacaacaacaacaatgacaacaacttttaaaaactaacattttttcaaagtgtagggctgggcatgcagcccagtagagtatttgcctggtatgtgtgaagctctcagcttgatctccagcacagcataagcctggtgtggaggggtacacctgttatcacagtacttaagaggtcgaggcaggaggatcagaagttcagggtctttcctcaactacagcgcaagtttgaggactgcttgtacacagtaagaaagggtcgcaaaaaataataaattcaaagtactaaggcgtaagaaactgctggctctcccctttagtaaccctcagatacagtggtttctcacaggccatccctaatgttgccattgccaccaactgcttagaatggcacctttgtgcctttgctttccacgagtaatacttcaagactggcctattctgctggtttgttcagaggaaattgttaaggctttgttggtccactgcactgtcctggttctctattaacttcggctctttattctttacctccccctaaacgtttccagttacagcaagaacacttagctcaaggtctgctccctgaacagatatgtacacactcaatgccgcattgtgagctctgggcatggcacagcagggcgctaaggtgcccaggacccatttgccctgtgtgactggccacacggcagctacatgtttgccctctgtcagcccacagccaccactattcttgggacaaatgtcttttcaagtctttcacctactttataatgagatggattagttatggtttttttctggtgagttatatgggtccctttttaatttattttgttttattttatgtgcattggtattttgcctatatgcatgtctggagggtgttagattacctggaactggagttatggatagtggtgagctgccatgtacacgctgggaattgaacccaggtcctctagaagagcagcctctactcttaaccactgagccatctctccagctccttatatgggtttctaactctatagtttttgaagttcctttaactgctaactgtttaccacctatatgatttgcaagatgtttttcttattctgtaaatggctgttcccctcttgtgtgtcatttatacacacccacatacacactctgatccccacacacactcgcccatatccgcaaacatgcatatcaccttattttctgtttttgtgcaatgactaaactaaggcagatttacagggattgaagtgacgtccttttttaacaattcagcttccttgtgaagatgttttatggaacctccgttgactggtaggtgactcaccactagggcacaaagaacctgctcgtctggaagcagagctgacttgagcattcagtgccaagcagacaggccatcagccagagtgatgatccacaaatcagtcccctacaggcttaagtgcaggcagacctggctgggaggtgagtgccggaagtattccaccccacccagccacacgcagatacctcaccccagactcagaggcccaccttcctggataacttcatctatctggtaatacttgaagaccaagggcagaataagcaagattgccccacaggtcctgttgctgtcattcatggagaagaccctaatgatgggattgcttccactgcagattgaaatctcctgagcacacagtgaactgtaaagcagttacttcaacacttccaatctgactgaaaacacagcactatagaaacatgtagagatggactgccttgatctgcagttggtgcccctgaactaggtgaggtcaggcagcccctttgccactcatgctttggcctctctgcagcccgtctccttcccaggaggcagcacctttgatgggctgaaatgcttcctacggtgctgggcgaagaccgagactaagctgccttttgacttacacaagagaagagactacacaacagaaagttttcatatgtttcaacccaaccatttcggataaagatgatcccaagaccagctgctcaaggagtggttaggtataagatatgtgcattgcatatctgtatagaagaggtttcataccagccaaaagaagctacaaacaaggtcttaaactcatctcttttccacctctgtaccaaatgtccccactgcctgactaccaaaacatactccaccatgagcccagggccacatactgttcaagacctttgcccattttttttttaaaccacaggctgatttcttgctatggaggtgcagaaattttgtgaactttggagagtaacttcatctcagattcttgattgacaaatatctgtaacattttcaatgttttatatccaacttgtatttgtgtaaacacaaagctccaggcccaggactatgttgccgagcagcagagggtgtggaaagtgcagaagagccaggaaggtcttggagaactgagccagtagagcatgggcgcaggttccagagcattgcaggagcttaggcccagagcctgccgtgtccccttcagactgaagccttgctgcaggggtgcctgtccaaggagaaatggtagaagtgaaagaataccagggctgctcacatttctggaaaagccctggaaacttatttccaccatgtaggcccagccttacactcttgcctgaggccctagagccacagaagagatagaagaaggctttgagttgccgagggacggaagctcactgtgtggtaggttctggttctagccagagtgtaggagagacgacagccctgtcaggtgcctggcaggcagctgaccctgcacctcagacttcaggaccttctccctggtttgtatttacacagatacaagttggatataaaacattgaaaatgctgcagatatttgtcaatcaagaatctggggtgaagttactctccaaaactcacaagaacacctgcacctccataacaagaaatcagtctgtggtgtaaaaaaaaaaaaaaaaaatgggcaaaggtcttgaacagattttcctccttgaaagtatacatacaaatggccacagaaagaacatggccacttggcatctctaatcctgaaagaaatgcaaaccagaaccacaatgagccatcgcctctcctctgtaggatagctactagctaaagggtattaatgtattttataattcaatcatcagcatttttattatcattttaaatattttttacttcatgtcagatctgtgagttcttttaaaatgtgttttcaaacttgcaaatgaaaccaagtgtggtgacacatgcctgtttttctagcaggaagctgatgctgtgttgttaagagtttgaggttggactggggtgcacaagtgcctagccagccaggcatgcgtaggaagacacaacagagttgatactgtctgcctctgctcctctgtcgtgaataatttttgcttatgctgttcctctacctctaaattacatgttcattttctttcagtgaggagtgttttcatattttggcatgcttttgtatgcttcatggtattatctaatcagtgagtatagttgaatagtttttactttaaaatagtgtggataccttatctctgtaaacttgacagccttaccagtcagctttttttgtgacagagggcttgccataaacaacttgaagagagaaagagatcttagctcacaaaggcttcatcgcatggtcctctgtgcactcccacagacttttaaaccatgtgtcctgaggacagacattatcatctctcatactcacatatatacccaagcatctagacacaacgaatagctgttgtagacattaaaaatgagagggagggagaaagagaggggaggggaggtgtgtatggggggaagagccagaaatatacacgtgaaaagtatgacttataaagtacttgattgaaagagctaacaattctggtcaagtgagacacaagaaagcttaggtaggactttattgattatacatttacttgagatgaacacttatccaaacttagaatgatttaaataggcgattaaaactactcagactacttaaattcaagtcaagtctttgggtttatattttataaaaacttccaaaaataactcagtacttatcaaacctggcctcatactcaaaagaaaaatgaataataaaggagggaagccagcttgagccccaccttcctttatgatcttctgactgaataaagatttacttataatacaaatatattttcattttcagaaattgaggactacatttgagttgcttcttggacaagttagaatatatactgacttatgtgaataactatgttttaaaatgttagagatggaaaatgaagctagattcttccctttatctaatgtcagctgtatcttcaaatttatgaggtaatttttccacatatctccacaaataataaagagcagcatttgccctgcatttgagctcaaataaatgtacattcttttgaaatgaaaatattgacaatgagcacaaaattagaaaagaaagaaaagcaatgcatataaatcacgagactcttgggagggagtttaagcaaatctaagaactgcacttttcatgattgtacattttctctttaaaacaaatcactttcccaactctgcgtggcttgacaggtccaaggatgacatcagctctttcactatgcactatctgctttccttcagataactcaatggcacttcatcaagttttaatgattgagatgaattagaaaccaatgggggttgagtttaaattcccttaactgccatgcatcatgtattcctggccttagacctacttttgaacacccctgagaatttatattgcccatggttttctctggttctagaaatagaagtgaacaagtgaaggaacatacactccttaaagttctaatagtgtctgtcaaaatgtactaaattacatcactgtgcttcaggaatccatgccaatcatcttcttcccagtctctcttagcccaataagtataataaacttggcactgttgtttcatttcaggaaaatcacatatgttatctgtggtgtagtgtctttcattagtggacagatactgactcagtaaggtgacagtacaaagatcatataagaaattaggctgttattcaaaaagaaaagagcaagctgtgaactgcactaactactcttgcagcatctaagaacttgcctgtgactgtcaggcagtaattcctgtattctagacatctggtctaccactcagctcttctaccaatactgctcacttttgaatgtacatccaaatgtcctgcttttgttgattaacattagatcaaaattcagcatttctttttcttttcattaaagattgtgcatatggtggggggggggggtagagtatgtatgagtctaaggaggtcagagacaccatttgaatatattaatgtacatattctatttaagacataacctggatgagtctctggctcagtagtagagcatttgcctaacatgtacaggacccctaaattcaacccctgataccacctacaagaccttaaatctcataactgacttttgaagggtttataaatccttcccccaaattcttgtttaagttgactctatagcaatgtacattgtctttctggttatccaaatgccagaatgttttttcaatactagtgtactttggagtgtctggcaaaaacacaactcaggccagtcagcagaatgattttgaagtttgacttagatgcatagttctttgtcctgttttcctgatgtctatgctggctagttttatatcagcttgacacacagcagagttatctgaaaagagggaacctcaattgagaggatacctccacaagatctgcctgtaaggcattttctttattagtgatagatggggaagggtccacttcattgtgggtattgccatccctgggcatgtgatcctgggttctataagaaagtaggctgaataagccaggaggaacaagccagtaaacagccctatggcctctgcagcagctcctgccttcaggtttctgccctgtttgagttcctgtcctgacttccttcaatgatgaacaacaataggaaaatataaaacaaacacatcctttcctccccaacttgctttttgctcatggtgttttatcacagcagtagaaaccctaagttaatgtcctatggtgccaacattcaaaaagaaaacttaggctcttgggaaatgtcagtgagctgagtatctacctggaagaggttcccaaattgatagtaagggggttgtaggcttcttcccagagtctccctgggactgctttggcagtgggtctgacttcttcacagaaactcctctgatcttatagaagtgctgaggttgggtgcagacaaactcttatggactcccagaaagattgcatagaaaaagcaagtgctgcctctgtgtgcccaagagactgcccccagcttttgcctctataaaaggcatggcaggtcattctgtgcaacctttgcctgttgatctgtcattgtatctcagaagacaaagagcatcctcacccagctccatcgtaagagctcatcctgtctctgggaccagcgagcctgtctctgtatctcctgaaaaaataaaggcaacttcctgggatataagaagcaggtctcatcatttaaccacagtcagagggaaactgggagaattgattgttcctgtgttttttactcagagtgtttaaagattagtggcaaacattctggtccaataaaaagtaaaagtgttttctatttggcgtcagtttataaaaaataatagaggaatcaaatggaattagaatatacagaagtatataatggtctctgagtgtgagggaggtgtgaagacagttttcattatccttttgacctaattcactggatgtattttatttacaattaaacattagaaagaaagaacaaaggagaaaggaaacaaagcaatactgtgctcaggttggacaccactcctctcctctcccctcccctcctctcctctcccctcccctcccctcccctcccctctcctcccctcccctccccttcccttcccttccctcccctcccctcccctctcctctcctcccctcccccacccccataagtgtgggaactctgctcagagccttggggctggagttaatcgtttgatttctctacatagtatagatctgtaaactgcctcagtgacagtaataaattagagtgtcttgataaagaccaaactcatcaatttttccaaaatctgtatttgattaattctacaaaggtctaggtcaaagttattcctcaaagcttatcattttaacaaagaaacccaaggtttccaggtttgtcagaaaactcattatcgctgcacgatggcaaaaggtcacaaaatgcctccttccacaagacaaatttcttctgctcaacaacccattcccctagcagaaccaagaaaaacctctgacatttcagatccttttgcttcagggaaaataaatgttccccagatcgtggaggaaaatgacaaacaaattaatgaaaaacagatccgttcctacagtgtacccggctagggcagaccgcatacactcaaagtcaagcgctcactctcaggtcctgccacctctgcagagtgacagttcccacagtggcatcagcgctgtcctcacagaaagctgtacacataccacagcgctgcaaaatgaaagaaacatgcgtcagaaaaactccagtgtttaactgtggctggaactgtgaacttgtgagtacgggcattttgaaagtgactcagccccttctcacagtgcacacgcagaacttgacttaatttagcagtgctgttttcctacaccctaaaagttcctgcttttaattctgcatcatttgtacctctgaacacatgctttccccatatcttcagtttccactgattaactaattttaaccttgaggacatttcttccttccttttttcttccttccttccttccttccttccttccttccttcctttttttcttttgaaccaagcagtatggacaaagcccgagttccccatgaccccagctgggtgccagtgctaacgggtttaatttgccctttcagaatccttcagttactcatttaaacaatataggcatgtggaattgtatacatgtgtgctgcttttcccccatatacttggtttcatatgaaatgttttgctttgtttttgtttgccatatgccttagttcagtaagtagagattagtgactttctatgggggctgctttgcctctgggggagacttggtgacttctagaaagctttttggtagttacaaatgggtagagaccaaggatactgacaatcacaatgtatacatcagctccctaacagagcatcatctacatgaagtgtcaaggatgccaagaccgccgctgttaggatcttcctcctctgacctgcagcagagccagtggtccattcagccagtcatgcacaggatcatttggctgaatccttaagcatgtgggcctattccttttcaccacagctagccctcttcctgcatacctgtcttaatccattcctgctgctataacaaaataccacgggtcaaacacctcataaatatcagacatttattgttcacagttgtggaggccaagaagcccaaggtcaaggtatctgcagatgtagtgtctataatgggcttaatctccaagtcaaaaatggtttcccttggctgtgatgtcttaaggcaaatggggtcagaagggcaaaggtgaaaaagggaagtatctctcttcctcaggtctttttgtgagggcactaactaagcctgtccatcctattcatggtggaggaactaaatcattccaccttgtgaccctacctctcagtaccttgggggtcaagtttcaggaggccattccttttaaccacagcaacccctacaggctaccaagatctctgaatgtcctggctccatctcagaagccaccttgtacatttcccaaagctagtcaccagggtttccttcagcactcatcccccacttggccttgcccctgactgtccctccctcctctgtggtaccaggctgattcccagaatcatgctagactctgttactatggagattaactatggatgggtcctgctctgcagactatctggtctagcatcagggattgtgccaggattgcaaactgactgactgactgactgactgactgactgactgactgactgagatatagtattacagattgtagaggccagcaagggatgctttttcttcatggttcagaatttattacacattttatcttggtgactatttctcctgaaacacacgtttcaaacagtaaatcaacaagaaagctcctttctctccacttacagcccctgtattgtgtcacacacacactctctctactgagaacacacttggcctctgccaaggctgagagcttcctttgagagcagtccagcttgtgagcagctgaggggagggacaggtggtccttctacagctacaggtccttcccctgccctgactttcagcctcctttggatggtggtgccttgggctcctgtggcctctcactccttcaaggggactccaggagtagactgagataaaggtgctggctggccctcatctccctggatcaaggaaccttaagcatctaccaaaaatccaacagcaaaggaaatctcagctgcaaatccaatccaataaaccccttcagcttgcacttagtgttcactgtgcagggttgcgggagatagaaagataaatgggatgtcatccccaagaagccggagcccaccaggatgggggcatgtataaacagttacatagaatgcaaagcagaatgaagttaccactaaaaaaaaggcttgagcagagtagctgggggaggagggggcttagttataaagcagggacccagcagcacgcctgaaagccacttcccacctaaaaacaagaggcactttatgtggtagattgtcttcagtttaaacaacaggaaagtaggatttctgacaggagaaatgaaacaggaacacatctaggttctcgagagtcattctgcaaagcttcgtcacacggttggctagcctgggtagaaatgggagccaaccatctgagttcccgtcacacacatgggagagccacctcagatcttaggaaggcatctagctcagtctccactgctgaggccaagcagcccgtgctgtctagcaaagatgtattgattcatttctagtgtgtgtatagacacggaccttgatcacgtcaggtctaactgcaaagctcttcaagttctctgtctagacctgtctacgtttatccctctaatgcccatggggtcctggggccagaaagcttgtagctcagcacagaggccgttactggagaggaccaaggcttccttggatgaggaagcagatgggagggaggcgtggatacagacaggaaacgggtgcatgaagtaggtgggtgaataaatacaccagtcacaagctttctttcctcattcacgtttgctcaattaatgacctcacacacacacttttttttttctgtgttagaggcaaaacctagagcccttcacatattagggagacttgacctctgaataccaccaccacacacacataaccacacacacataaccacacacacacacacacacagagccagataattatatttcatccctctaggtagaattctagttgactgaacaagagtctggaaggcaggtaggatgtagttttagatgttccagagggtccctgcactcatgtcatatgtctatgtagcatatttccaggaattcatcttacaatgaagcccactacccatcccatggtctctagggcaacaggctgggcaagcccagggtctcccctgactaacaacaagctgctgatcagactgggctcatgtgaaagttctgcttctgaagctatataggtcactgacaaaaggcagtggctgaggccgtaggactgaagccctactctctactcggggacagtcaagaccttgcttcctgtcctctctggctccaacctccgcatcagaaaaccttcctgctatggaatctcatgtgtacaagctttcttacctccttgactcctgtcagccagagaaaactgtcctcagagactcctgggattagggtagacccttcaggtgatctccctactaagctcatggactagtcactgtattgtagaacacactttgcccctgacataatgcatcagtacagcaacactagaggccaatgccatgggaactatcttggaatctggctacccactgtcctggatgtgactctgtctgaccttgaaatgataccaggagattgaaagccagagagctgagactgcagatgggatgggagagatacaggagatgcctctgggaaccagagaaaagcttttgctggctgaatcagattactgagctaggaaagaaaagcttttcactagtgagcattccggttgagtagaatatcgaagcagcagggtccttgcctctttagctgttcctagatgccaaggcatcttgactggaaatgctatcctgacacagttttgacctgagaaatgtacatctctctaggaaataactctacatgaggcccaagtgcctgaagcagagaccgcagttagaaagaaggactcagaggctgtgtgactcagatctcagctccaagccacctgagaagttctccagagataatagctcctcaaatgtttcactttttcaggacacagactcctttctccatttccccaggtgtctttttgcttgtattcacaacatggtgtcacgggcttgtattgtgagcattcagtgaagttgtagaccttccttatcgaccctattgtcaggtctggacctgccaaggggctgaaatcagataaaaacttcaagagctgtctttggggaaatgtgtggggaggggaatcagttcgtgcagatgctttcctccgccttttccacaggctaccccaggctgctaactgttggacactgcctgccctccacctcacaggtgcagaaagcaggggtctgcttctgttttaaactacactgaaaacgggtgtgcttgctcttcccgatctggtcttcaccatgaggagaatagaaaagaatctcctaaacaaaaagcagggatggagtgcagtgaggggggggggaggaaagagggagggacggagggatggagggatggagggatggagggacgggaggtgcctaggcagggtgttagggctcagtttagctaaaaagcacttcctaatgtacaaatccaccactcaaaaaggaggaagagaaagattgggggacacagtttacctttccagcagccatgagactagaaaaaaattctttttaaaatatcactttaaaactgaatcacactaactctttttttttaattgggtattttatttgtttacatttcaaatgttatccccttttgcagttttcccctgcacaccccctatctcatctccccttaccctgcttctatgaggtgctccctcacccacccacccactcctgcctcacctgccctagcattcctctatactggaacatcaagccttcacaggaccaagggttcccccttctattgatgccagataaggccccttcagctccttcagtcctcaccctaactcttccatagggtccctgtgctcagtacaatggttagctgcaagcatccacatctgtaatggtcaggatctagtagagcctctcaggagacagctggatcagactcctgtctgcaagcacttcttggcatcagcaatagtgtctgtatgtggaatggatccccaagtgggacaatttttggatggcctttccttcagtctctgttccacattttgtccctgtatttcctttagacaggaacaattctgggttaaaactttggagatgggtggcccccatccctcaactgtagagccatgcctaacctctggatatggtctctataggttctccctcctctttgtggggtatttcagctaatggggtcctaggaggctcttgctttcctggcatctgggactttctgattgctacccccagttccccatcccccattgctatacacttctgttcaatttcctgaccctctgttcatctcctccatctcctcccatacctaattctgcccctctttttcctttccccttcctttcttcctcgaaagtgcttcccaccctctacttcccttgattttattgttccctcttctaagtaggactgaagcagctactttttggtcttccttcctcttgagcttcatgtggtctgtgagttgtatcatgggtattccatagtctttgcctactatccacttattagtgaatgcataccatgtgtgttcttttgtgactgagttacctcattcaggatgatattttctagatccatccatttgtctgagaatttcgtgaagtcattgtttttaatagctgaggaatactccattttgtaaatgtaccatattttctgtattcttttctctgttgaggcacatctgagttgcttccagcttctggctattataaatatggctgctatgaacatagtggaacatgtgtccttgttatatgttggagtatcttctaggtatatgccttgttatatgttggagtggtatagctgggtcctcagaaagtactatgtccagttttctgaggaaccgccagactgatttccagaatggttgtaccagcttgcaatcccaccagcaatggaggagtgttcctctttctccacatcctcaccagcatctgctctcacctgaatttctgatctcagccattctaactggtgtgaggtggaatctcagggtcattttgatttgcatttccctgatgactaaggatgttaaacatttctttaggtgcttctcgggcatttgatattcttcagttgagaattctctgcttagctctgttccccattttttttgatagggttacttggttctctggagtatctagtctgttagtctatgtctttttattggggagtttggagtttagtccattgatgttaacagatattaaggaatagtgattgttgcttcctgctattttttttgttagaggtggaattatgtttgtgtggcaatccttcttttggatttgttgaaagattaccttcttgctttttctagggtgtagtttccttctttgtatttgagttttccatctattatcctttgtagggctgaatttgtggagagattgtgtaaatttgtttttgtcatagaatatcttggtttctccatctatggtaattgaaaattttgctgggtatagtagctggactggcatttgtgttctcttagggtctctatgacttctgcccaggatcttctagctttcatagtctctagcgagaagtctggtgtaactctgataggtctgcttttatatgttacttgacctttttcccttaatgctttttaaattctttctttgttttgtgcatttgatgttttgattattatggaatgggaggaatttcttttctggtccagtctatttggagtcctgtaggcttcttgtatgtttatgggcatctctttctttaggttggggaagttttcttctataattttgttgaagttatttactggccctttaagctgagaatcttcactctcttctatacctattatccttaggttttggtcttctcattgtgtcctgggtttcctggatgttttgggttaggagctttttgcattttctttgattgttgtgtcaatgttttctatggtatcttctgcccctgagattctctcttctatctcttgtattctgttggtgatgctcatgtctatgactcctgatctctttcctaggttttctacttccagggttgtctccctttgtgatttctttattgtttttatttctatttttagatcctggatggttttgttcaactccttcacctgtttggttgtgttttcctgtaattctttaagggatttttgtgtttcctctttaagggcttctgtttacctgtgttctgtatttttttaagggagttatttatgtccttaaagtcctctatcatcatcatgaaatgtgatttcacatcagagtcttgcttttctgttgtgttgtgttgtgtgaaatattaaaaagaatggcagttcccaagcttcactcagcccctgaggtcttgacgaccagttcttaactcagggagactctctgactcagagctccaaaatctctccacccagcttgctcagttcccactgctgggtcactacagcatcagccccatgcttcaaaacccccaaggcctttgtggtgcacttcttacaaactcaccctttgccgctgtaccttcctctcttgaacccagtcaaaccactacgtgaaggaaaacaccacataaagttagttcagaaacaatggtaactcaatcactgggcgcaaagacttgaatcctaatcttgttagccatattaaatctaaaccctttggtagtaaatcctggcagatgcgccatataagccaggagacactagtagctacattttgccctctcgctatccccatccaaaaagccttcctgctttctctcttcctctgttcaacccagaagtgccacctacttgcccagtgattggttcctttattcattaggggaaggttcacaagaagtctctccagcgacagcagaattaacatcaaaatacagccatcaccagggccatccacaacagtgttgtgatatctagagctcgctgtggtggtagaactggattcttacgatgccaagtagccttggtttctgttgcttatattctcgcacttacctctcgacatctagctatctatggtgttagctggtctttgctgtctctgactgtggcttgtctctcctgtaagcctgtgtctcagcactcctgggagactagctctctctgggcagaatttgagagctgtggcacagggtcagctccaggcgcagatggaaactggaaggatcctgtcccaggttgctcctcggttcctgtgtcctgagggctcagggcagttcccttttgggcgaggtatttgagcagaagtggtggtcccatctgtactctcaggtatgtcagcactcctgtgggagaccagctctctcctggctggatatgggtatggagagctgtagcacagggtcaggtcaggggtgcagatggaaaaactcaccctaactcttaattttgtacattattttctttcattgattgatgaattttattattgttttgcttgagtttggggttttggggggttgttttttgttgttttgttttcttgtttttatgcctttttatatttaacaaatacttgttgcctccttgtgtctatgatactgtggtcctggaataccacataccatggtactcattctttaccatatataaaaattcccacagcaacatgtttaaaatccagcttccttagagcctccctataaatagctcaggatccctgagtgtgtagatctcacacacacacacacacacacacacacacacacacacaccactctgaagtgtagatgactcaggggtcttccctttgaggaaggttgtcataaaaagagtctaagccatagtttcttgtccaaagaacacatcactgctgcatcaggggctagacagtcaacatgtgtaagatgagttattaacatccatgatggatgccaaagagccaagcaataagcagagaaaccaaatgtgagaggaaagaaattgagggtcctcagaagattaaaacaaagggttccaactgagcctttaagaacgaaggaaagggtgagtgagggaggagttgggggacaagtggaggagcatgatcaaagtacattattttaaaagaacatagagcgggcattgagtgaggatgtatgcacagaggcaggtggccttgtgtggtcaagacagctcaacacagctcaggcagatggagtcagatggcttcactactgtgatgagctctgaactacaacctcattcttctttcttattaggttgctttccaagatatttcataaagtattgcacatggacatgtgaaaaaaaagattattcacctttgaaatacttggagtgcagtatgtgttctttgagcctgatttgtttaagtgtctgctttattgggaaattctggagacgccaatagcgtctgattataaagttcagacgcaaaggctttcattaaaagcatgctcccttgccttgcatattttccttcagaagtggcagccttgacagtgaagacttcactacaaatcagtgagcccaaggaaaatagtctcaaaatgtggggacagtttgtcagcctctgtgtgtggtgcccctgtctgttcacacactctgtcattacagctcattcttgttctttttttcaattgggtatttatttcttttacatttccaatgctatcccaaaagtcccccacacgctcccccacccactcccccacccacccactcccacttcttggccctggcgttcccctgtactgaggcagataaagtttgcacggccaatgggcctctctttccactgatggccaactaggccatcttctgattcatatgcagctagagacacagctcattcttcttacaggcatcatttaatcgtcgttattaaagagtgcttgatggctacaccacctctgctcagaactggttctttctcaccccaacattttgaaaattggaataaaattcctgaaaatattttttgtcttattaaaatggtaagaaattgagagacccctttcttgatagtattcataataaagacaaagaagtagaaagctataatgccacaggattctgttatttagagataaatcactgctgtggggttttatttggtgagttctgtgtggcttcaggaaaagaaagtccagagtttaatttgcattgtgtagaaaagctgttagtgaaaatatctgtacttattctgcctgtgcatagtcagtctataaactttttatcatcagcgattatactcatgtgtgcccagacaatttaagcattaaactctcccacttgtattttatgcatttaatggtgcatgtttgagtgtgtgtgtgtgtgtgagagagagagagagagagagagagagagagagagagagctgtctctgtgactttctgtaatttgaccagcatttgaggtgaattgaattatctgagcttgtatttcttctaagcccctcttcattgctgagtggctgttcctgatctattacatgcatttatttcacacacagatagctctgaaatcttcctcaacctggattcatatggtcactcactgaagattccattcgctctccctcctgtctgcctcactgtaaaaattcttcttctggcagatgctggggcctgcctttcttcctgtgagccagtgtacattgtcctgcattctcaggtccttgcagactctcaagcacctgcctattgttgcataaactctgacccacacttcagttgagattgcctgtgtgtgtgtgtgtgtgtgtgtgtgtgtgtgtgtgtgtatatatatatatatatatatatatatatatatatatgctcctgtttccatggtgacctgcctatggatcacatgtgtaggtgtccgtggcatggtctttcctcataagcatacaccaggatgtgactctttatacttgcttgaacagtcaaatggatgtgaatatacatctttgacagagcatgtggcaaaaacttggaatagtgaacccagtctggggtcagtcatttggcagagaggctctgacaccatggatgggtaatgggttttgatctgcactaatattttgcctttttccaatattaagtttctgctttcaatgtttttagggataaaatgtggtcagaattctgtgctcattgcttcatagaatatatagttcctgaggtcctctgtaattctgatgttgatacacccctaggagaattggcatgtcccattcgcacatctggtttgctttaggcaagggaactttctcgtgccagaatggcttttggtggatataggaaatctgctttatgttgagcctctgcaactcacagatgcaaatgtttaaaaacacggccatttcttcatctgaaacgtccccagtcactactttcgtccaaaaaaaaaaagaaaagaaagaaagaaaagaaaagaaaacccacaaaagaaacccaaaacccttacagtgttataaattcattgtacacaatccatatccactcatctcatggctcatatcagagcggacttaactgtttggtggcatcctagggtgcatgcccatgtcctggtctgctctgctaggttatgtcctcttggtggaatgtattattattctcctccatggggaaggacctcagacacatcgccatctgcttgggaagatgatgcagccccgttaaccctgaggtggtgctatgtggtggatgatatgtggtgacaggcctcttgccctccacctgcctccaaaagcaagaagcccctccaaactgctgtgcctgcagcgtcaacctttttttttctccaaatttgaaatttaacctaatgctttaggtcctgtattttctatgagaaacctaacttttcctgtattgctaattgttatattggattattttaaaagaaaacagaaaaaaattttatgtaggaaaaagtttaactatgttaacagcactaggtcaaagattcaagacctttgagagcttggaagaaggaatcacccccagtcatgttgtaatacaactgaacacagggctttgtggctgaagtagctaccccttcacccccaacccccacattcaactcacatattccctggtggctctaactgtttgcaaaaggaaggccttgcattatagtctcttaaaatgcatacaaaataaaaacttaaaagccattcggtgagaattagaggttcatggctgaaggtacagccttgaacgagaactgggtagttctctcgtgtccccagaaaatgagctcacatggcaaaaacagacaaagtctaccccctgccaaactccatgtcagcagaaatctggtctgctttcccaaatggaatgtggatttccaaactcgagacgatctctttccaaagcaaatgagaaacaaatacgtcctgggcactggctctgctttccatccagggcacagatttcccactgggttgttcctgtctgccatttcccaaccagcacgtggtcctgggacttaatagagtcaaaaagcccgtgctggatgtagataaaatctctctcactctgacttgccttactgctctgattcacagcacagcagcctcagtgtctgtcccgtgaaaacaaatgaccaaggttttgtggaaaagactagatctgggtcctgctgacatagtcagtgcaccagcctctgcccacaccaacagcctctgagtcctgtctgttgccagcagtcctaaggccagccaagatgggggggtgggggggggagagaacatgtaacctgagaagtgtatcagtgggtagtggggccgtggcaggcctgcaggcaagggaagtcctgtcccccctggacttatagctgggacactgatcactgcaggacctggagtgagatggcaagtatggacaggtgtcccaagtcacacagttgaggctccattctagtgttaggccaggccctgactctagcaacctcaggcaacctcagcatgacaggtacctttccgagctccccgtgaaaggtgggaactagttaaaaggcagccacctcatgcctccacctctgaccaggcctggcctttcccccatgtttgtcacgatgcctatggaaaacccttcagtgagcccttgatgctgatccaaggcaaagcgaacaccaggccatactgcagagcctctgcacaggctgggttctgcttagcactgtccccttgccctccctgagccatgcacccttggtttcagctagccttcatgctgatctttggcccctactgtatttttctgcatctctgtgtggtaaaactgtggtaaaagcccatttcagatgggctctccatgttgggccttcctgcccatcaccactctacctttcttggtagaattaaatactgattttacctcagcatttttgatgcatttagctcatcactatagggttatttgtccccagagacctggaggcctgttcatacctcttggtgtttctcacagcccactcctgggcacgtagcttatccgtcacaagcatctgtttttacagttcataccaagatggaagcctttgattcattatcattttggctctgattaattgaggaaataaaagcagggcctgtgggacatccagttgacatttattggtaacttctccacccattacaggcccagcaaaaaaagtcatcctagttccttgaagcatagcatagaggcccattctgaggcaggaagatccactgtactgagagctcacaatgaaattgatcccctggggccttcaaaagtatttggcttttggaagcgcctgtggctccagaggtcagtgggctgctttgatggaagttccctgttccagaggtataaatgcaatgcagattggatctcactccacccagtacaggatgcccctgccagcacactgggccctgcctaagacttgcctcctcatgaggtcacagacttcatcagaaaagtgcccgggggcctggggagatggctcagtctatatttgcccatgtaaacgtgaggacttgggcccaaatctctagcactcacgtaaaagttaggtcttacaggatggtctatggtccctgagctgataaagtggaaatgcgtagatccctggagctcactggctagcctattcagctaaagaggtgaactgcaggtacagtgagagactgggataaaaccaaaactataactgaagtcaattaaaacaacggcaacaagaccaacaatattgacctctgcctatgtacatacacacatttatctcttctctctctctctctctctctctctctctctctctctctctctctctgtcatacacacacacacacacacagatagaaatttgtgaagagtcagactttcaaacaccaactgaatgtgtaagagctaccagagacatgtctactcatctttgcatattaactcaattttaatgtgacaatcatactggattataagtgtgcttgttttaaaattctttgtcttttagacacgtgctgaaacagttacagaggaaatgatgtttgacagtgggtttgaaataatatagaaaggagagactgagaagtcaagaggaaacatagccacaggctggtgattgctagagctgagtttgggataatacttagtttttcatgatgtctgatatttttcataacaaggtgattttagcagaaaggctactttgttcctgggctctcctgtctgagattttctcttactgtgtctctttgctttgtccaagtttgctcatgaggacccttagtaggagaggccaaattactggcttccattgaaagaactttccttaagttctgtcaaataggtttgaaagtctttgaaatttggttccttcctccttcacatgggggtaaaggacagtacggagatctagacagaagactagaactctgaactgtgggctgaaatgtcccctttgagcgatggcttttaacctgtgggtcatgacccctttgggggaagctgaacagcctcttgtcacagtggtcacctaagaccatcagaaagcacagatatttacattatgattcataaaagcagaagattaccattatgaagtagcaacaaaaataattttatggttggagggtcaccacaacatgaggaattgaattaaagggttgcaacgttaagaaggctgagaatcacaacctttgaggttcatcccttgcctttctcctgtgaagagtagctgtcccctggctacagctggtagagaagtggaccatttaccatgcacctgggtcccaggggaactggcaaaggagcatttgcaaagaaaggacacttcagtagaactgaagctagttagaaacccacctgtgaagatgggctttctgatagagccagagacctctggccagccaggaccatgaaccaaggcaggctctgtgctgaattatttaacctcccaaatgtttccattgtgtctcctcctagaccagaggctctctagtccattagcatagcattttccaagagtggggtttcaccagccctctccttaaccaccagcataccccagcatgatacagatgggtgctctctgcttccccactgtcttcggccaccctcacctccctggccctgcacacaatatctgtggttatgagagagcagagagactatggaagcatcagcctggtgacagtgtaccctctggacacgagttggatggtggagttctcagctgtctctacctatgtcagctagccatctttgctgacttcctggataggctgctgtgactaccaagctgtagtcgtcacattccaaatgtcaccaggcagttaggatccaggaaagacagacgactgagagttcccaggcaagaccaggaggttgggatgtaccacagcaagtggcaggtagaagataaagaatagggtaagaagaatggctgactgggaacttagaagtaggcttgagtataacatggctacagggttttgaaatctggatgcataaaaagagactaaatgtgtcactactgtatccggcccaggaaaggaacctaatccagacactgtgtcctatgcctgggaagtttctgaggactccattccaggctgtgttagctgttggtgtgagcatgaggttcagtgtggtggctcataccataaccccaacccttgagaagccaaagtagaggggtcactataagattgatgccagcctgggctatgccctgagtcggatgttagcctcttctgctattaagcaaaattctgactaaaatcaccaaagaacaaaaactcacaaaatcaaagcaggcataagactgggatgtccatcaagggaccctggctcttgtcatttcgtattccctctagactgcttaatactgctaaaacaacagggcacgatggtaagacgagaatagcccagaggaaatatttttgacaataatggtgaagctcatctttcctctctgtcttatgtcagccatttgcttccttgataactattagcccattcagttctcacagcaccccctggaagtaggtgtcggcattcccagttttcagagaggaaagagagccataggcagggtaagttgtttatgttcccaggcaacccagctagaaagtagcaggatcacagctctgagtccaagctcacagagtcctctgtggtgttactgaccgtcagggttaaaggactggagaaatggctcagtatggaagagcagagggcccaagtggaaggccctgcactttgtgatggttcattctaggccttctcctgaccactgtgtgtagtagtcacgcacatggtgttcatacatacatacatacatacatacatacatacatgcaggcagaatactcacacacataaaatgttaaaatctaaaacaaaacaacaacagtaacaactggtttcttggggtgttctattcctgaggtgattctgcaacctctgtccaggtactgtctcaggcctgccgagccagccagctcctggagactcggcctgtgatttttaatctgtggccatcccagctcatcaaggcaatccccctatcagacgacagacatgctgaccatgagtgtatccccacatcgtcttcccttgttctgacttctcctcgtcagccagagagaacagaaaaaacccagctctgacaggaatgaactttgctctctctctctctctctctctctctctctctctctctcagcagcagctcctactgccatgggatgggggtggggtgcatgcatgcttttccttgagaggcagaagatgggagggagggaaagaactagaaatcagagaaacctagagcagcagagatggtcttcctgccagcctcgctgtgtcctcttcctgacaacctctctgtgttctctacctgtgcttgctcaacctttatcacaggcccgctgtcaaatcacaacgcagaggccggacagcaactcgagctgcctgtgggccttactggcgggatgattctcccacagagaagtggtgaacaggaaagtaaattagtatcagataaacctgatgcgattatcggattaggccgctgcttgttatgccggtcagcaaatgtgagagaaggctctggtgtttccaaaagcctcatggagatgtgctttctaaagctataccattgtcccaaggctctgcccagcacattctctctctctctctctctttctctctctttctctctctctcatgtaaaacatcttattgttctttaaaacggttcagggtttggttttaagtcagtccgcacatctttcatcagtctctctcacatgtcaactggcttcagccaccaatacgttatcaaattcattaagtccaaaagaaaaaaaaagctttaattttgagggtggggggtggggaatgtccagttctgagaacaattaacattagtcttctttaaaacaaaatgggggccatttcatgtcgctttatccacccctcttcccacacagaacagggatgtaactctctctggcaggcactgatacagatggacacctgcaggtgcataccctcacaggagcacacaatgtgcattcttttgaggaaacctatgaagaactccatgcctttaagaagcactgggtaacaggtatccatcccataatcagccaccaaacgcagacactattgcatatgccagcaagattttgctgaaaggaccctgatatagctgtctcctgtgaggctatgcagtgcctggcaaatacagaagtggatgctcacagtcacctattggatggatcacagggcccccaatggaggagctagagaaagtacccaaggagctaaagggttctgcaaccctataggtggaacaacaatatgaactaaccagtacccccagagctcatgtctctagctgcatatgtaacagaagatggcctagtcggccatcattgggaagagaggcaccttggtcttgcaaactttatatgccccagtacaggggaacgtcagggccaagaagtgggagtgggtgggtaggggagcagggcagggggagggtataggggactttcgggatagcatttgaaatgtaaatgaagaaaatatctaataaaaattgaaaaaaatatttacaaatgccagtggcttgtggaagagcagttattaaattgattttgtaaacatgaaacaaagaataaagcttccatccgaatgttgaagaagaagaagaagaagaagaagaagaagaagaagaagaagaagaagaagaagaagaagcagaagcagcagcagcagcagcagcagcagcagcactgggtgaattctcataggaccctccaagccaatgctaactgtctctggttggcaaatatttacaaggtgtgaactgagcactatgtaaggattcctgcctgagacagctgcagtcctcagctggccctgactctagactcatcagtggacctcagaaggcacacatgggacccccaacaggacctacctgttccctaggagggtgcagctctaagagctgctgttataagcagaaacagttgtggctgagagcaggcagaagggtcaattcttaccagccaccagtcaccattaaagtaagagccacccattcttgtctcctctccaggatccactcttggaaagcccttgggtaattacagcctccattgctgcctttggctgttagttttagtggattaattatctgccatgtcgagagatttcccctgatccctttgagatgttctttcccagcaacggctgatttagaatttcttgggaggtcagattggttgcgtggtttccatatcttcccatgttgtgtgaaagagagccgttcccagcctccctttctcctctggcttattctcactttctcaagagaagcctatgtgctaaccctggcaaccctcaaggacagggtgggtggtgaggaaaggaactcagctcctttgagtttctaattcaccctgagctgggtgaagcatgggctctctgtcttgggtccatctgcagcaagcgatgctaatccccagagcctctctgcccctagcatccctggttgactttgccagagcctaactaagctctgtgaagaaatcatctgagtgaaacccagttcctaactcagcagtgggcacagggtagttacttaatagatacggtctggaataacgagcaatgccctgcgttccatgggagaaggagctacagtctgtatagggctcacattgtctggaagggatttccactggataaatcaggaaagcagtcacaaactgacagacgatcagcaagcctcaatgatccttcctcccaccgtatccacctcccactgtgcttgggttacaggtataagtggtcccatgcacagctttttacatgggagctggagatttgaactcaggtccccatgagtgcacagaaccaccattagctatctccccaggctgagtttattttctttacatctgactctggctgcagtagcctacccctctgctctccccagttggcctcagcccctgtttacatcactatcaaatcctgctgtgacttcagaactcccactcagtttctatctagtgatgtttatcaaataggtagtgcctgataaagggatttggtgggtacctccagagggtttttataatattgtgttagctgcaaataaagtgtgaggattaagaaagatactaacaagggagaaatgggggaggtggggctggggaggaggaattctgcaactcagaagagccctgctgtgacaagactggacagttgaccttttgttaccttagcgcggcctctgggtcatttacatgtcacagcattagttcttcatacaccttcatgcattgtgtgtcccattagcatcttcaatcttcatccacgggtgtgtgttttaagattataaagattcagtcatgtttgaacactggagttatctctgggcctgcaaaagtgctcaatttggttggcctcggtgggtggggaaggaatagtgcatgagattttagtccacttcccagccttcctctttgccaacttgttgttgttgttgttgttgttgttgttgttgtttttctatgtgaatattctaaagctttgtgtaaggccttgtagacctctccctcacccctctcagtgcttcgtgcagaatgcatacatagcacaccgccgggcaaagcagtcatggacccagctgtggtcggatctttctgagaaaggcacatacatggagtgaaagtagagtgcttgtcataaaagactagcaggggctggggtgacttggccaaaaatgcacctgtgccaaggtgatttgatcagaggcctagagagggagttacccaggcaaagtgttgtagagtaagttccctgggtagacagatggaaagatgcaaagatgcaaagacaccagcactggaggaagatcaggctgggccagcagagctcagaacagctggagtgtgtcaagcactaaaaaaaaaaaaaaaaaaaaagccccgtgcaactgtgtcagaacacagtccaagaccggagcagtgtgagaatcaagtgcttgtgagagaactccaagaaaacaaggcaagagtctcgaggcctcagtttcttcacaacatgtgttgggctgtgtttctgtgctcctcccaggtgtagcaggtaggagtgagtttacctcagctgttgctattcggatgcctctgtggaaatgtggtttggccatgtgtgccctgtccttgtgattgcctcttaatcctcagagtataaattgtctgatgctctgaataaacttggctactgcctgagattttagtccacttcattttaaggctctgccccacccccaggttcacattcccaaccagaccagtaagtagaattgaagcattcccagcaaaggccgtagtatgagatgagatgacccagggtaagtggatgggttaagacaatgctgcagactgaaaagggcccagtgtgtgggagctaagaccggatacgtatttgtttccctttcttagacagtgtgagatggggcctcttccaagcagtgctttggagaccacagttctttcctctgtgcatctatgagctgccaaagctgtgtgtttgtctatacggaggatacaggagcacgttctggcccacagggcactcccatcttatactgcccagcatgcagagaagaacagaagtgctattggagtggtcctttggaggagatggagcaggtgacacaggcctgatgggccatgtcacagttccattcatagagtaccaagtgaggctgcatgagtgaacccacctggtagcatggcccccattacaagatccccacacgctctgcttcagacctcttagttcctgttcaggctctgttggccgtctgcactgtcctctggctgtcagaatagaatcactggtctgggtggaaacacagcactccagttggactagatagtggtttaaacaagaatacccttatagcctcgtgtctcagcatgcttagtccccagttgatgactgtttgaaaggattaggaggtgttttgtgtggccttgttggaggaagtgtgttgctggaggtggactttgagggttcagaatcccacaccaggcctgttgtctccccctctgcctgctgtctacacatcaggatataaagctcttagctctgtcccagcacaatgcctggctgcacgccaccacacttccctgccgtggtggtcatggacgcaccctctgaaacagtaagcaagctcccagttaagtgttttcttctatgagagttgccttggtcatgctgtcccttcacagcaatagaacagtgactaagacagccaggctcaatcatttgggccaaggaccccctcctgggaagtgatgtcaagaaggcagagatggggtgatcagttccttagtgaggcagtgtggctgtacctttcttcttcctgtctctttctgaggtgtgttctcctgacctgggcactcccgtccttgcagtgttttgggcagcttactcttctaaaaccactcttccagctctgtgtctgatctccatgccaggcccagtggcctttccccttctccctccatctgccccctccagaaagctgctgaggctcagggcttacccgcccctgaggtctttcttttaatctctaataaaattgtccttgtgtttccatttgagtccgttcttcgatgctttgattagcaggactgagaaccccacagtggggcctggattgccctgtataactcccacactcagggctaggtcacctcagcacttgtctacaaggctctgagctaacacagatagctgtgatatagaccatcccttctggggcactgagtcctggctgccatctgtggccacattgtcacagtctcaagtcatctttggagcttagtcaatgaacagtggacacagagctgaatctttgaacctgcctttcatccgtgcttaaaaaaaaaaaagttactggcttccaatttttctttttctagttggaggaatcgacactgatccaacccatctgtttgtttgtttgctttggtgtttttgttttgttttgtttagacaggctttctctgtgtaacagctctgactgtcctgggactcactctagctttgaactcagagacccaccagtctctgcctcctgagtgctgggattaaaggcatgccaccacgcctggcccctttcttttcttctgagacaagacttttctatacacctgggttaaccacaaaacctcttgatgttccttcacacctcctgagtactaagattagccatgcatcaccatgccatccgtcacctgttctttccaggctgttcctagtctgtccctctccagcctgccagggtgcccaacctcccactcacccagatgtgcttcctgccacacaggaccacctctgcccaagtcacctccttccagtttgctgatcaaatcctcctgggagccctcacccaagtctcacctcctctggtagaaataagctgtcacaggaatagtaagttcaggaggacttattatgcaaagacttagataatgcaaacattataaatcacaccagcaggataaatcccttttttctggttaataaataaccgctgcacattaccagtcctttggcacccatccttccggttcactctaagcttcctggatacatatggtctccctggtacctagcacaacctcagagcaagaagaagaaagagagggagaaggaggcggagaattattaataatggttgtctgtcattcctgcccttgaacagcagaggtactaaaaaaaatttttttatttgctattttaccatgcaatcccttgtaaaatgcactgccgtgggcagttcggggaggagcgccttttcaaccccaaagggaggccttgagcgcgtggggagggaagcagagatctgtgcagcttcctgcctgcctgtgggcttttgccaattcaggaagtgacttctgagggtttcatagagtgttcagcgataaatattctgaccttcatattcacaatccttttttctggcatgcaagaagttgcaagatctcagtgctttcgagagaatctaccttttggatttcctatgttatcaagatttatttttctttgtttggtctattgttgttttgaaataagaattttttttttgagataataggcatgaggcacaatgcccagtttaaaatgttgtttgtttgactttgtttcttgagacagtttcactatgtagccctggctgtcttggaactcactctgtagaccaggcaggccttgaactcagagtgattcacttgcctctgactcctgagtgctaggattaaatgtatgtatcaccatgcctgggttaagagatttttattgggggcagtggtggcgcatgcctttaatcccagcactcgggaggcagaggcaggtggatttctgagttcgaggccagcctggtctacagagtgagttccaggacagccagggctacacagagaaaccctgcctcgaaaaaccaaagagagagagagagagagagagagagagagagagattttaattgacataattgtccatatttatggggtagactattataatttgatacatggtcaaatcaggacagttagcatttctctatccttgatcattatcatttgtctgggttgggaaccctcagacctgtctctggtcattagaattgcagagtggattgctaaagaccatagttgatctctatggcatctccctttctctgattgtattttggtaaccaatagttaccagcctgtggctgtcatgtgacacactgcaccaaagccaagagaggccatcagaccaacagcccaattttcagagtccatcatgtcagtgggtttttgctcttcagtgactctggcaaaaaggagtccccaatgtggcacagccctccatgctgtttgtaaacctgcccggctctgtccaatggaaagctcaattccgtttagtttttctccctctcttaattggtttttccaaacgcaggttcagaagtaggagtttgatgagcacatgctcttgaatgcagggagttcccacccaccggtgtaagtgaaggtggcaggggtggcgagtctctcctacccgctttgataaagtgattattcaagagagggcaggaaggaagatcacacacacacacacacacacacacacacacacacacacaattacagaatggctcagccagcacaacctcagagtccaccctttggtaagtcctgttataagtatgtgtgaggtgcctcaaaactaacgtagtttaggtaactcaggattgggtatgtagaaagaagacagctcaggctatggggaaagaactgggtctttggaaaccttaagagaactatctgtgggaattcatagtcaaagcagacctatacttgagggacctcccagtcaggtgttctttgagctttcccaatttttcgttctctctgaatgagctgtagagcaatgtagcaatctttgcttgctgtctcaagcatgcttccagctttccttgtagaaagatcctgttctggatcttggttcctgtgagagcccaatagcttctcagaatagaaaactaccttcctttcaactgggccgctgcccagagccggggtgggcaagaacgagctgccttgctattggtgctcggacctctggcaagcagtacctgtgggcctccttgcagtgattacagggtttgggtgacactgggatctgggcagtggacagcagtactgtagggggctgttcttggaagaatgccgctcaccttcaggtttctacaccgaaattgtcacagctgtgggttcctgggatcgccatggatacgccgtccccagcaacccagtggccaggcccgcccgacagccatcatggctgaaccacaagcaaagccccctttccaaattaactattaaattagtatcatttcatccttgtccaaaaatgtgctcagagcccagacacgtctttcctgcttgctgggatataaactgtgccacgcaagaaaagcacggttctcagagaggcctttggatcttctgtaaggatctgtggttaggatttcactaaatgccatggtgggggttgggaagacttttctcctttcatcctaagccagaaaacagacgacccagcctgttctgtgctcatcatcttaatcataggctgagggtgaatatttttggttagtttcccttttttatacacacaatgcctatttatagccatttgttgttaggctccaccaaatacttggaaaccatgtatttagagagagacagaccaagattgtgaactggatgagaagccatcacactgcattagactggcccatgtgcggcaggatcagagtggaggctgtggctggcacacgaaggctgggccaggacagacggtctgcgagcacttaactagaagatgacaagacaagatgcatgctctctgtcttttaggcctgagctttgttgccatagctcattggcccccaagttcatgtttctaagggcattctgtgcaagaagccagtacaggctgggccagggaagttaaccctgccttgctcagccttcagagacgcttcctcctgcagcagaggggggcaaacacagagactcacagccaggcactgcacagagagtgagaggccctaaatgaatgtctccatcaaatccccccagggctcagggaagccagtggaaaaggaggcagaaaaagtggaggagccagagtgatggagacactaagaaagcaaggccctctaaagcaacagatctatgcacagagaaatttaagactgaaccagtgtacacagggcctgcttggcatccctgacccagaagcaatctccagctgataaccacttgcaaatggacttttagttttctcctggggagtctcactgtacaaacaaactactcttaagggtgggccacatgtccagcaggaggtgccagcaggaaatgaactcacagcctcttcggaggctccttgtctcacaatgtcagatgggattttccttttgttcttgttttaatcatatttttattttatttatatatattttaatttttttcttctctatttttacccttcaggtactttgcatatatattgtgacttccagtttagtgtttttatgggattccagagtgtgggagtaagtcagcttctgcatctatatctgtttcttgtgccttttctgggatttttttttctgtttgtttgttttgtcctagtccaatgcattaggttttgttttattttattgtatcttattccattgttacttgtttttatttactattaatttattatataatattttattattatttattttctaatgagagatggaaggggaagggaaactggaggagtagagggggaactggaagaatagggggaactggaggagcagagtggggatgggaggagtagagggggactggaagagtagagggggaactagagaagtaggggggaactggaggagtagaggggggaactggaggaatagaagggggactggaggagtaggggggactgaaggagtagcgaggggactggaggagtagggggaactggaggagtggggggggactggtggagtagagggaggattgaagaagtaggggggactgaaggagtaggggggactggaggagtaggggggaactggaggaggaggagtagggaactggaggagtagaaggagcagaaactataaagggaatatattatgtggggggaaaaatctcattttcaattttaggaattaaaaaaaagaaagaagcctaatataattactgtctccttgctgtcctgccaactaaatctcaagtctcctccctggatcctgtctgtgaccactctcctatcagtctagtttcccagttcactttcctctgtatctttccaccctggctctctgcagtaccccatcctttgcccctttatctgcccagcctatataattcttccactttagttacagcaggcagaagttggtctaaggcacctggatgaggagtctggaacaccacagaggggatgctcatgggagcctcctgatgcactgtcaaatacaaaggatttttctgacttttctacttctcctgggtcacaaggctaccaaggcctgtggtatgtgggcacaaaataaaggctagggagccagaaaagctgcagagggggtgggggtggggctaaagaagctgaaccttacttcacagcctaggccaaaactaagaggtaaataataaattccttttctgagaaggtggggttgtaagaaaggggcagtgagtgagtgaagcaggagggccggacgctggccacatgatccctggggcagtcctagggttagagctgtgaagaattccacggagagaggaatgtgagtaggtggtaagatcataaagtctaaaataccaggtgggatgttgagttccaatctggagaatgaaggaaaacattaaaagctgaacagagaaggctgaaaaagaaaaagaggaatctggagtgtcttagttagggtttcattgctgtgaacagacgctgtgacaaaggcaactcttagaaggacaacatttaatcagggctggcttacaggtcagggattcaatccattatcatcaaggcatggcagcatccaggcatgcatgcaggagtagctgagagttctacatctttatcttcaggcccttaggagatgactgactcccacatggttaggaggagggtcttaaggccatgaccatagtggcacacttcctctaacaaggccacatctccaaatggtgccactccctgggccaagcatattcaaactatcacatggggagatggcttagtggctaaagccttgacatggaatgaggaccaggatccccatcttcagtatcgagttaaaactggttgggcacgcctgttgcctaaatactagcactagggacatagactcctaggacaatgtggctggttactgctagctgagcagaaaggtacactctaggttcagagagagaaaagtagagagcactatagaacattgaaaggagatagttgatttcattttcaggcttccatatatacatgtgtgccctgcacacacacatgggatggaggggagggagggaggaagggagggagggagggagggagaaaaagagagagagagagagagagagagagagagagagagagagagagagagaaagaagagggggggggggggaggagaaggagggagaaggaggaagaagaagaggaagaagaagaaggaggaggaggaggaagaagaagaggaaggagaggagaaggagaagaagaaggaggagaaggaagaagaagaagaagaaggaggagggaggagaaagaaaaaagaaggaggaggaagaagaagaagaagaagaagaagaagaagaagaagaagaagaagaagaagaagaagaagaaaggaggaggaagaggaagaagaagaaaggaggaggaggaagaagaagaggaagaagaagaagaagaagaagaagaagaagaagaagaagaagaagaagaagaagaagaagaagaagaagaagaagaagaagaagaagaagaaaggaggaagaggaagaagaagaaaggaggaggaggaagaggaagaagaggaagaggaagaggaagaagaagaagaagaagaagaagaagaagaagaagaagaagaagaagaagaagaagaagaagaagaagaagatctttatatgcatcttttacttggagatggataaggagactctgaagggacaagacctttgcacaaaaagagatggtctgccaggactccaagttgccttttcccccatccacaaggtcttgctctgtagtccatgttaggcttaaactctcaatcctctggcctcagagtccaaggagctatgattacaggcatgtgctatcatgcctgatctttgggctttcataacctgccacatacatcttattgggagctcagcccaccctctgagccctcccagggaagtcatatctcctctgggttctccctggcaacaatgtttattgcatattttacaatgtggggtgtttgaaccaaagcatcctctcatttctggccacactctgacttcttttattctgaggattggtatgtagcagccacagtgatcaagataggttatctgctttatagataaatgaatgtatcaaataaatccttcaagatttagtacaaagtaaacatgcagtctacttcgggtaccaatggtgatggcttcatttttcagtgaggtccccagctgacagttcagcgatgcttgctttctgtttcatgcctgaccttgctcaattgacactcctggctagtgtcagacactacctgactattgaagttccccgtaatcaggctcctttctgagtagtcaccacgcacaatccaacagtgattaacagagctctgtctaggctgagcaagtcacaccagagttgtcttttcacaaggacttttaaaatatcaactacgaactgagtgagtaggtgtcagaggaactgactttgtaaactgaaaattatgaacttagattcatttgaaacacatcatatgaagtgtatatataaaaataatgagcattttgattccccccccccccgtaggtaataaatagcgtctgtaatatccttccccaccttttcctgattagcttcatgtctggcatattttccccgacactcctgtttcaagttctaaggatttcgccaaggacagacgggattctcaataagtagtgtgggtgtaacagaaaacttgcactaatctggtgaaagtctaggaaggaacaggctgtctaatggcagccaggctgcccctgctacgtgtttttacagtcagagcttgagctccacaccctgagcttcactctcgcctggtgtcctcacctgtaggggaaatggacaagacacaaggaggggctaggggagggaaggaagaactgttgctaagctctctgtgcttgcacaggggtccaggagtcttccccaccgcgtcctcctttcggggtactctcctcttgtctccccagcaccgaaacctctcctttcctgttctctctctgttcttccttctactccagtcttctgccttccagcgtaacactggacaggctgtgtgcacccatggcccctgcacaccaagttctcaccccttggcatggtctatgttgtaactggtgtggcagagatgatattctaaaggggcagactgttgaaacactagacccccaagaaatgggaatttccctaggagatctcatgctgtggggaggaaaggggacagacagaagggaactggggacttgcctccctgaaagggatttcacagttttaacaacctgtcagaccaccttacaggatgagattaaacccagatgctgatgggtcagctgtgggcaggaccacaccttgcttagatgagggtattcttgattctctatttgaacttgatctcacttcagaaccctgaaaaaggacttgaagagttgatgtccctccaccttgtccttcttcataatctggccacatcagacaaatctttttctgattcctgctttgacatggttcttttaattggcttattgggggcaagtgtctaggtctgaatttcattcacagactgggactcccaagttccaaaacaatgtggcctcactaaacacttgaccctctcacttgacttaaagcaaatgcaacgaagatccttgactctgttcaacttcttcctccagatttatacacgagttagagttgcccttctgaggtggtccctggtgtcattgggacagtgtgtgagactaaactggaaaaaaaaaaacagtacttgaaacaacagcaagcaagtggagagtccacagctgtgccctggacttggagtgagcctgggcagcaagccccccccccagtgagacaaagtccagtcgagtgtttaggcatttcaaacaacctcaagacagtcttgatgaagccattcaagtttccgtggaaactgtcagatgacagtttctgatgtctgagtgtacagagagatgacagggtctgccacagctcagcacacatatcccattcctaccccacacctcagcccacaaaaaaagtcataaaataaaagccatagcagtgcctgtggctccccagcgtcctgctagccgctgtttccttggggagcccttctctccccacctgcactaatcaacactctgctattctgagagtccctgctgcccacactcctggcaacactcactgttgttgcttacatgcaatggtctttctctgcctggctgtagccagcagcagcaggagctccagaaattctcttagggatgcataagcagtaggtacttacttagcatatgttaggtcccaggcaccattccgtgtgtgtgtgtgtgtgtgtgtgtgtgtgtgtgtgttgtgtgtgtgtgtgtgtgtgtgtgtgtgagagagagagagagagagagagagagagagagagagaccacacacacacacacacacacacacacacacacacacacaggtcaactgagtaaatgaggctctgtttctgagggggcaatggctgtatgtagttctatgctgttttctctctgttctcttcctttcctgtctgattcctaagcaatcaggaagacattcctccatagggatgtgtaaatagttaacaagcccaactgggatgatgttttgcaagagggtgaagaagaactccctaagacggtgattgcttggttctgaggacagtcactcataacaatgataagtgtagatatagtaaaaagagatttgtatttgaggaatggagaagtgttcctgaggtgcccacagaaggcagggaggaaacaatgggttggttaattaaaggaggcgcatataggaacgttacagttactgcagctggacatccaagggacaggctggttgagcaccatgtcctctgtgggactgtcctacagcagtaactatatgacatcagtacagcggatgctgataaagatggtaccgtcagatctctggggcaggaagagggccaggagcctaggtcagctcagactgggccagatgatagactatggctgagctagctgggctcacagagccagagttgggtgtcagagtgactgcaggccccagctggtcccagtctacaagaagaaggaaaaaccacttttctgcttcactctgtttttatttgggacctgatctgtgatatcggatataaaatcctatatcatgtgctgtagctccctataaaactttctaacaacatcttgttcccatggtaactggtttagaccacacagttggcatagggccggacaactggaaacaccttgactttaatagttgccaaccataggtcataggttaagagatgaagatgacttctttgagtttattggtgctgtccatgttccttgtccaatggcaactgcacggtgattcaaaagccacgcaaactgggtctccacactcagtggtgcctgagttcactatccatagactctgattctatctcatgttcatcctctgagctgggcagtctttttatacttgttttacaagcagagacaaaatagtgcaatgacttattatggtgacaaaaagcagtcgatgtaaaggcctctaatatataccctggtgtccgggtttgcttttagaactgcagggtggtgatgtagggtctgatccactaaagtcttcatagatctccacatccttgaagctagtgaagaggccatgtttctttttccatcattagaagttaaccagagttcctcagcaaagcatcagagtgggccagcaaagcatcagctcggggcagggtgcagggtggtggttgttctatagccagcttaatatttaagaaaccattgttaagaggaaaacttctatatttagatttgtaatgttttttttttaaacaaacaagacaacagtgttcatactcacatctggctgtagaaggctctgccatacagccagatgagaacataaccttagccaagcccacagtgactgggacatgaaccatgaacaccctgaagatttgatccacatgtgcagggagtctctatccagctgcagcctactccagctgtagggagtcaggtctggtgggagatgccatcttccagtcggagacctctcaccagccagcacaagaaggtgtttgaacttcacctagatttgggtcctttaaactttgaccaggaagaaatgatcagccactctaatggttaacataagttaaacttcaatataaattgtgagagatatttaaagggctggagagatagcttaagggttaagaacactgactgttcttccaaaggacctggattcagttcccagcacccacatggcggctcatagctgtctctgactctaagcctagggggtctgatgtccacgtgtacatacacacacaagtacaacactcaggtacataaagtaagaataacttttaaaaggagatgtgagatccacataactagtagccagcctcctcccagcaagcaagcaggcctgacagaatttcaaatgagaagacacttggacaaccagatttctgaaagagctaacgtttgctgaacataatcttggagaacattgcactgttagtaaatgagcacgcaccctttgcattgaagatggatccagcactcgggaggcagagggatctctgtgatttcgaggcttgggctacacagtgagttccagggtactactacgactctatctctaaaacaaacaaacaaacaaagcaaaaatggggaaatgataaagcaaatgggtcagtcggagaatgaaatatttaaactgttctttataaactatgaagtaattcaaagcaaggagattcattgggggtgggaacaggccagacaatagcacgggagagactaaacctcaaaataaattgtaaatttattctatccatacatatttttcttcaactctctcctgcttctggaccaggatggagcaagcacaggtattctccagtcccatatcaagggggaatctttgacacttctgctttgttttcctgggataataatcactttgcctgtctttcttcttttgctatttttctctaccttggtataagaagattaaataaataaataaataaatacctatactacttcatgacactcactaaaaacaattgccaagtattgctgcccagcttatagagccagtataggagttaagtagtttaacaaacagaaaacacttaaaatgtaataaaagattatcacacagtcatttgtacctcatatagtagacgtgaaccaaacaaacacgaaaatttagaaagacattttaatagcatcaaaagagagtaaaatacttaacaaagatataaagctgagtatattagcttggtggtagaatatgtattaggttaaaaaacatgtgttaggtaaatagccaggcatggtaacatatgcctttaatccaagcactcagggagtcagaattgggtagatttctgagtttaaggccagcttggtctacatagcaagctcctggctagctggggatgtatacacaatgagatcctgtctcaaaaaagtaaaattataaaatcagttccttgactgtaccagccacatttcatatgctccacagccacacgtggctggtgcctgaagcacagcccagcacagacacagcccactgccagcatcgtggagaggccccctggatactggagctttaaggacagactcagcccttggggcagttggcaagggtatcacaacagatgagtgcagagaagacagccttttgcactgaatgatgtttaaatagttaaaatccatatctgaaagaagaagaagaagaaggagaaggagaaggagaaggagaaggagaaggagaaggagaagaagaagaagaagaagaagaagaagaagaagaagaagaagaagaagaagaagaaaaggaagactcttgattcctacccttcttcatagacagaaatcacctcttcgtgggtttcaaaatccaacgtaagataaaggtgttggcttttcaccagtggactgtctccagtgatggcagtggaggaagcagccaaaccaggctggttcccgttgctacatatgatttaattaatcatgtaacagttttgtgggcatgacttatcagactaaacatttttgaattaaaaggagccagaagtaaaggtaaaatactgcatactctctgttcacagagagttcaaaagcaggcagagggcgtctttgctgtccagagataagtcacaggtcccttggagagaggagggagtgtctggaagcccagccacgggtccgacaccctggtgatgctcaacctcctctctgtcaggctgtgcatctgtgatctgcactattttccctacagggctgtagaagggtgtgtataagaactcctttctttagcactgaaaaaatggttcttgttgaataaattcttcacaaagatgaagttctttcaagaatttttaggtggtacaggactcagaggaatggggatcatctgataggagagccaattgctgtgttggaaaagcatggaccttcaagtggtcagttctagacacagaccccagagaagctccattccttgtgtaagaagttggcagtagtactcacgtggggtaatcaataccagacacaaaatgaagtgggctgagaacatcaacagagaaacagattaacatgctgaggtatgttgtatagtgaatttaaacagtgaagaggcatacgtgcacttatataattacaaaactctagagagggaatgatagttatagcatgtgtataataacacatgtgtgtaaagtatgacacagggctgtgcatattcctcaacacacgcacatgggcctgcactttgaaatgtctgaggatgcctagaagctataggaacaacagcatgtggaacagacaactgatggcaacaacagacaacaaaggagacttcaacttgatcttgttgtccagtttcttttgttaaaaaagcagtgtggggctgggggtggctccttgggtaaagggcgcctgccgccaagccagacaacctcagttcaagcccctggatccacatgatggagggagagaaataactcaagctgttcactgatctccacatgccacggtgacacatgcacgcctgtgcacacatatgcacatacacaagcacacacatacacccacacgcacacaaacaaatttgtgtaaaataaataaaatgtaagagcagttttttgaaggaaatgtggccaactattaacatctgttcacatggtgaccgttctagggagttagtatcctttgacatgctctctgtgttcagtcactcaaaagcagagaaataaagttgagataatagtatcattcatcatttagtctagacgtgtcgtttaggtattctctgctcctgtttgttttcagaaaaacatgtatataaatgtaagtagtgcagcaatagcagctccctcccttctgtttatgttcaccaagtcatgcttgttttatttaatacccaaaatgtttgatattgaaatgtgccctttatacaaactcgtgagggagattcacggttttatccaagcctgtgcgccagccatgaacccccttcctgtgatgcacatctccacctgtctccatcactagaagcatccgtttgtgttacagccaaaatatttgcaagcaaagaagcaagaaattagccaggttttccttgtgggtgcctattaagactgaaaccgctgatgtgtgctggatcggtgcccagacttggaaagactggcaagggataggactttcaccttttccatggcctgcagaacctgtgccaaaccctgcatcaaatccagggagccctgaagctctgtagagcatggcacaacataccaagttttgttgtcctttgactggcctggtcttgaactcccatctgcctttcacctcctcggtggagtgtggacttccttgttttggtctgtgctctggcaggtgctggggtcttgactgtcttaggcaagggctctgcagctaagctctgcccccagccctgttttacttcattgtctttgagtctgcacttttacaggcataaccacacagcctggcatgcacttactaacctgtctacttgttcagtaaaacaaggggaccttctgaagtattcccaggacaactgccttgactacatttgaaaagttaagaaagaaatgtgaacttaaaacagactaaatagtattcagtgaggtccaaaagttgaagcttatagatatgtaaatatgtactcatggtcatgagtacacccatcccttgtcatcacgggtcagcaatgtcctcagctaaagggacctgtacagatgagagaagaagttagccagaaagaacagactgagtgtgctcagctgaaaccctttcctgggtctaagtgagagccagcgtgtgtcccagattcttgcacgcgctcaactggccaggaagaacgacgctgcaacaggatccttctgcacacatttattgggagagcattgattgcataggcgaaagaagaacaatgaacaaggaaaatgatgctgcttatatacccctccatgtgatgtgtcagctcctgattagctgctcactcattaccccactactacgccccgggatgggcagtgacttggcacgaatttactcttgcacctgcacacattacttgtttaccagttaggcacagcggaggctcatgatggcaattgctcacggctccccacaccagatgtttgcagtctgatcctcaccgtgtgctgtaagggagccctgagattgtccagttactatagctaagtgaaagccaagggccagccactcgcacagctctttctactgtgagccaaagccacattctctagaggcagtttcatcactagagaggtgataattaagctcagtctatctggctctggctctggctctttttttttttaagatttattaattgtgtttatatgagtatatgaatacactgtcactgtcttcagacacaccagaagaggacattggatctcattacagatggttgcgagccaccatgtggttgctgggaattgaactcaggacctctgtaaaaacagtcagtgctcttaactgctgagccatctctccagccctggctctggctcttaatgggttctaaacttgagaggaggatgaatattaataactgccccctcagaaacttgatcaactgctataagaccttaaaatgataaattaatataatccatgtgtcttagttaggctttcccttgctgtgaagagacaccccaaccaaggcaactgtataaaggaaagcatttcgttgaggctggcttacaggttcagaggttcagtcctttatcatggcagggagcttggcagtgtgcagtcaggcatggtgtaggaggagctgagagttctacatcttgatccaaaagcagcaggagactgtcttcctgggcagccaggaagaggctccctaattccactctggggaaagcttgggcattaggagacgttaaagcccaccccacagtgacacacttcctccaacaaggtcacacctcctgatagtggcaagcattcaaatgcttaagtctccggagcccaaacccattcaaaccaccactactttatatgctcaaacagtttctatacccatagttattctgttgaatagttaaaaacactgctcactaatttttacatttcatgaatggtttaaaaagaaatgcatctgtagtttttttgtactatgcttaacctctcctagcttgtcagagacttcaaaaaatgtgcattttataattttatatactatctgcaaaggtacaaccattcgcagaaaatgtatttcacttacacatttaagaggaaaaagaacacacatattcttgcacactcatgcacacacacacacgtgcgtgctcatgcacacacacccataccacacactcatgcttgtgcacacaaccgctgcccagctccgttcctgtagtagacactgctatgcacatggctctgcatgttggcgggaggcaatgattttaaggatggattagccttctaatctccttgggatttcctttatatttgtggtggtttatgactgacatctaatgtaactatactttgtgtttgtatttaataaaagattcgtttctgtggcaggacacacatttgtactctggtgttgaacaaaggctactgttctgcaagaagggtataaaatgttgatttataatgacacaggccaataacagcaatctaattcttccaaactatttcttcccaggtcctggcaagaacatgactccagcaaaggacgattcttttccgttagaacattctgcctttaacacgtctatccatgctgggatcagatacaaaaattggaaactcctcacgggccacccaggtagaatgcttcgctcccttcctgtggccaccagagtagggcagtgtcctcagcctgtcctctgggccttcattccctggactgtgtccatagaaagggaagtccttatcactggctacaccctcctcctcctccttgcctagccggctcctcaaggctccctgccaacccctcagtttgctcagacatctgaaatgtcaactagtccttcagatcttttacagtccctgcagatcttaaggaagcagctatctgcttgtggtttcatggccttcttttaagcctctgtctggtccatattacacaacttctgttgtctgcctaagtagacttcccaccaaacagaacagtgagagaacgctcaccaaaatgagagctgactcactttttttttgtaatatatctctgaagctgcagggtgggggagtggcttccgctgctcattctgaccgtcctccgagttgatatttgttgttgttgatgatgatgatgatgtcatctgtagtggggttaagaggagaaaatcccacttgggtgcttcataaacatatatggatttttagacatgtgtgactgtcaaacatagcacacccagccagctgtagatcttcaccaattctctggctggggagagtctgcttcccctcccccttccttagaaagggacagcttcactgttttgtaaatatgggatatttccacaggctctgatgcagtgtagcaatgcttagttcgtgagtgttcttggtgtttacaatgacagttcattgtttgggactgtcccatgcattgcgagagatcttagaattactgtgctgttgcttgatagcaggagtaccctcattgccccagccatcgtgacaactaacacccccatcctgcttccaccccacatatagtttttaatgtcccttgtaacgctataggatccgtatcatcatggcatggaaatcgtattctgaactcgacatcagaaggcacaggttttttgtttgtttcttgatgtacgaccatacccacaaagccaaggaagccttgtacccagattcctgaaattagaacccaccaacagtgccccccacacacacacacactaaagtttaatttctttaccaggctgtggttactggttcccgcctccgtctcagtccaacgtctctgagatacctccagtggacccaccaaccaagactctctggctttttgatatcaatcaggaccctgaagaaagacacgacgtgtcccgagagcacccccacatcgtccagaaccttctttcccgcctgcagtactaccatgaacattctgtgccttctcacttcccacccttggacccccgctgcgatcccaagagcactggtgtgtggagcccctggatgtagggctctggggagtaaggggggctggagcccatttctgggcaggctagacctcaggcccctactcccctggcttctcttctttatcatcccccaccctgtcacctggccctcatgctacataacccaccaaaggagtccaatttcaacccacagtacattctaaaagccagtaaaatctggaaggatcttgctgttggctggagttagtgtctggggccagggtggccgggttcatcctgcttcctaaactacagacgctgggaacttgacataggaagttatccctgagtcctggaggccaggacagctggctctttttgcttcacaagtcagctgttagaactccctctgctaataaccagctttattggcaagacacatttcttgtaacaaaggcagggagcagatgttgctagtggttctgttggctgtgagtgctccctgtctgtgagctcttactcgggctttccgcacccatgaccctaaccctaaccctaaccctaaccctaaccctaaccctaaccctaaccctagccctagccctagccctagccctagccctaacccatccgctcactcatcttcctgtggagcgcacagcccattgcagtaagccagcatggagacatgcctgtgccgtggttttggtttccatgataactaaatgtgtttttatctccacccccacccccacccactattgctcattctgtctagacttctgctacccagcttgtgtggctctgttcctgtcatgcctttggacttcactgtcctgtgcctgaggtctctctcccctctgcttcacccattctgagctttaggatagtcctaagccctgcccagaggaggtggactggtcattctgtgtccatgctaatgggagttgtgggtctgtggcatctgctaaggaggattattcacagttgcatggaatctgtcaagattgtggctatatctcccactatgccatggtctatgctgttttctcaagcagtggcaagaaaggccaggatagcacttcttcgccctgagcagtctcagaaaggaagtggccatggaatgttggcctcagtaaggcagaggagacaccatccatgtccctttcattctctgtttcactgccctgttctggggctctggattctgggcttggagaatgaggatacactatttgactgtcagccctttctcagaccctcatacatcttaccgatgtgagtccaccagattcgcagcagggtgtgtcaaacccagtggtacttctcattaacacctctgtctcattcacagtttatcaccaacatcagcaaccatgtctgcgacataatagatagccagtactttttaaaaatgaattaataaacaaagtaaacgagaaagagttacctggcatttactagtccagtgagctgactgtaagggcagaataaatatcctccagcccttccgattctgtcctcaagctgtcccctcccacctctgcgctagcgggagaatgatctgggcagtcaatgaatggcaggtctgtgatggcctctgcaggtagacaaaagagaattctgcttcccgggaagtctcctttgccagcaatctccatttccattcttcactgcacactaggaattaaaaccaccaaataatatgatatgcacagtcatcttcagttcagtagcagcatctcctggtcattaatattctgtattttattatggtaagagtattataagaaaatggtactatggctaatgacatcttttaccaacctttacccaacttggctgacatatagcctgccattaggacactttttactccaaagactgtgacagagtctgagtgacatgagtctgaatactcctcctgtgtcctcctgtagctataggtggactgacggtccctacttcataacacctacctgatcgttccttagtgttctcagaacagctgtcctcagttccagctgtgactgtaggcagtgtttggaatattagcataactaatggatttaagaagactttcagaaagtgattcttaaaaataactggaggttttgtctgataaaacaaatagaatggaatatgtctcagattatatctcattggattttcatgtttgatacaaaagtaaaagcttgataacctatttttagagatattaatgttagttctttccaattttgtttaaccttgaagattttatttaacttgtgaacttactcctttgttatgccatgattgttccagatttgaggaacaaaataaaataaaatctttctaaaacta

SEQ ID NO: 9 - DNA, 171503 bp, synthetic construct
  misc_feature 1..171503: note = Synthetic
  misc_feature 1..88907: note = Mouse Sequence
  misc_feature 100..102: note = Start Codon
  misc_feature 18361..18547: note = Exon 2
  misc_feature 22350..22540: note = Exon 3
  misc_feature 35818..36025: note = Exon 4
  misc_feature 89946..89979: note = Lox72
  misc_feature 90005..91131: note = Inverted Mouse Sequence
  misc_feature 90487..90730: note = Exon 5 WT orientation
  misc_feature 91132..91165: note = LoxP
  misc_feature 91172..91203: note = Rox
  misc_feature 91210..91235: note = I_Ceu
  misc_feature 91236..91241: note = NheI
  misc_feature 91242..171503: note = Mouse Sequence
  misc_feature 108975..109045: note = Exon 6
  misc_feature 167714..167836: note = Exon 7
  misc_feature 168953..171503: note = Exon 8
  misc_feature 169216..169218: note = Stop Codon
  source 1..171503: mol_type = other DNA
ggcccgcccaggtggatgaaatcttgctggggagcccggccgctcagttcccgattctgtcgggggtgcccgcagcacgggctctgcaggctgctaaggatgggcaagcttagcccgtgcactggcaggagccggcctggaggtcccgggccgcagctgccactcttgctgctgctgctgcagctgctgctgctgctgctgtcgccggcccgggcctccggagctacccagcctccgcatgtggtcttcgtgctggcggacgacctgggctggaacgacttgggttttcacggctcggtcatccgcacgccgcacctggatgcgctggcggccggcggcgtggtcctggacaactactacgtgcagccgctgtgcacgccctcgcggagccagctgctcaccggccgctatcaggtactaggcggcctccagccccgcgtgaccccgcgagcccgccagctcagtcggaccgcgctcgacaaccctggcttccccaggctgctgcctagggccactgcgcatgcctgacttcctcctggtggccgaaggcaggagtggctttcgttttctctaggtcagaggagagcggggtttctgggatctcgaggtgctgtgtctgtgaacccccaaagagaaggatagacgaggtcctgaggagaaaggatggagaagaaaagggaggcccaaggagctccagagggccattaaagtgagaggctgcactgggacggaccctagtgactgacgcggtgtgtcatagatcaggagtgacctacttgagccaggaggataggaagccatgtagatgggagtttcagagattaatttagaaacactaaaaagacttgggattgttgacaagggacgcatcacccgaaaagccttcagtgaatgagcgtgggggtggggtatgtgaaagatcttaagctttctctcagcccctgttgtacctgggagtcaggccacaggtgagataaggtgcaccccaggctcctatatctttcctttactaagttacccccttgcctataactatgcatatgtcaacaacgtggaaattccagcacccacgctcagatcctccgctgtgcatggctaacaatggaagtcatttccaggttctccgtacccctacaatgaaaataagggtgctgatatttcttctacctttgagggtgaatccagcccacatgagtctcttcactgcccctttagagagtatgtcccccacagagtatgtgtatgttaaatgactgggaacagtaagaacgtatcttgtagtgtttttattgtactgaaacgtttttaaaaaccactttatgaggtagttatcttgaacgccctttacaggcgaggagatagcttgcctaaattggatgtcagcgggggagtcacacggctataaattgcaatccttagtttcctgcacctactcgtctcagacctatgaaattaggctcccctcaatccaagtttggtgggtttttaaaatcctgatgtgattatgatcaaattaaatttaataacttttagtggttactgatattctctgtctctgtcctttcttccctttctccccttccttccttccttccttccttccttccttccttccttccttccttccttccttcctttctttctttctttctttctttctttctttctttctttctttctatcctacacacacagtcacagtcttctggcctttcttcatacagagatttagacaacatggtgttagtatggctctcgatacaagtcagccaaagatgtcagatagcagatactcaaggaaacacgcgttagcagtaaatataagtgtgatgcactccactgtgtaatgggttataagtgtttattcagcaagcattttgagcttactgccctcctacatatgtgtctacagaacctctcggatcaaacctcatgttctaaaaatggttccagcagtgattcaaagactgaagagagaaggtaatatttttccgagggactcagaaatatctgtaggcagagtttactgtggagctaaagcgtggtttgctctcccactagcaataagggcatcccagggaatccagcaggctgctgtgtttaatcagctagtccccaggccagagcgagtatctcccagcacacagtgggagtctccacaccactgctcctcagaagtagggtgaggtggttctgcatttgctctgaagatcaagaactggactcacgttgcaaaataatggagggtctgtttatttatgcaacatcctcctaacagacatggagagaaaaacaattcctgcatgtcatgcctcacttacaggattgattgctttaacccctaatgtgctacatctgccaaatgcttgaaaatacctgagtattggaagtaaagctgtggttaatagttaaaggaaaaagagaagttgtgtacttcaaagccatctgaggcgtctcagaggagctgactcaaacacaatctgttgcggacatcacaagatcctattaaggattactttgcttagtgatatacttttactggagtctaccaacgatcgttgctttcaaataccacatgttggtacattctcagtacctttctattgtgcttcaaaagctaattaaaacagaatggtttttatacttaagtaatttgaaactgacggcagtctcatgtttaaaatcattgtaagagctgaaagaaaatatttgggctgggcagtggtagcactcgggaggcagaagcaggagcatctgtgagttcaaggtcagcctgctctacagagttccaagacagccaaagccacacacagagagaccctggcttgaaaagccaaatacaccatattttgggtcttccaaataatcaagtattttctcccatagcaacctctttatgtttcttggagtcatagtgacttagtagtggagatagttctgaaatatccaaatatttttctttgtaatatcggtgttgttctttgaaactggcttctagtgtttttttttaaagaattatttattttttttgtttatgagtacactgtagcagtcttcaaacactagaagaaggcattggatcccattacagatggttgtgagccaccatgtggttgttgggatttgaactcaggacctccggaagagcagtcggttcttttaaccactgagccatctctccagcccctgacttctagttctcctgttatgatgttatatttatactaaagagcagtggtttgacagttttaaaagctatgttattagcactgctttataacagggtcgtgtaagctgaggctggaagaaggtagatatgttgggaggaaaggacttgggtggcaaaacacttgccttaccagcatgaggtcttgacttcagatctctagaaaccacagaaaacatcaggctggtgccacatgtctaatcacagtactggcaaaataggaggtgggtccttggaaggtcatcggccagctagactgctctctctctctctatatatatatatggtagagttcagaccaatgggagagcctgtcttaaaacaaacaagtgaaaggtgcccgagggctgacaccttaggttgtcctctggcttccacaatgggtgctgtgcatgtacataccttcacccacatttacacacacagccacatttaccattcacacagaagaaatgtgcccaaggccacagggctaagaagtgatggattgcttatgaaccaggcaatgtgctcagaatcagtatttatagcaactatatcttgtttcctccttagaagtgttaaaaacatcagcagtgtaccttcatacttaataatatctttataatgtttaaccttttagctactcttaaatatctctatctgaaaagtgaatcaaaaattgcccatgttaagtgcaaaatgggaaatgaatcttatttctgaaagaatcactcagtacaagaaaatgaacattttgttaactatttcaaagttagatacttataagaactagtcgagagtcctgtctgtgaccttggcagttgtgacggttggttctaattgtcaacttgatagtcccttgggaagccagtctcagtgagagatgcctatatcagtaaccttgtgggcagttgtcctgattgttcacaacagccactgcactggccacattccctgagtctggatcctgggctggggagatggagaaactgagctggcttggaagcatgcgttcatctctttcaagcgctcgattgtgagtgtgatgtgtgtgtttgattggttatcttaagtgcctgccttgactttcctctccagatggactgtaacttggaatttcaacctaaaatagccctttctcctcgaagttacttctttaagtcagagcatttgtcatcacagcaatagaattaaaactaggatgtcagtcacactaatgtttagagaacatctgtcaaagtaacttttatttgcctgaggtaactgttgtctccgaagcttactgcctcagcaaacctagacgcagttctggaagcttctagcctctgtacaatcttaccggggtctagaatgttttcagcctctcaagagttactgctggaaaagcaagctcaccctttcttgttctttctgagtcctggatgcccgattcaactcggttgttctggttccaaactcctcttcacacataacctggcctctggcttccctcagcttctcttgaattgctctgcttgacctcaaactaactcaggcaatgtgttctaatcttctggctccttctcattctctggctcgttctgtctttacctgtgtctagcatgtcctttcttcaacttgtctctctataactgtccctgtaaaactgcctcctttttctgtgctgctctctctctctgtctctgtctctgtctgtctgtctgtctgtctctcttttaaagaattatttatttaatgtatgtgagttcactgtagctgtctttagatataccagaagagggcatcagatctcattacagatggttgtgagccaccatgtggttgctggaatttgaactcaggacctctggaagaacagtcagtactcttaaccactgagccatatcctcatctcctggttaatggtaaatacaaaaactagacagaattcagtctctcactgaattctagtgttctccctgtgacctttattatctttaaaacctgtctatatgctttatttttaagtaggaaacatatatggtgtaaaaacctaaatctggtaagagggggtttttagttttgtctgtagtgtagtccctgatactttgtccctgttccagtaaaatcttcccactgcactttaggctagaaactctaatgaaactcagtgggtctcacacaaaaggaagtcatgagcataggaggggaactggctgagaagggctctaatgggagacagggttggggagtggtgagacattgaaaacagttaatatctgttatataaatatatgaaactgtcaagtaaaaaaaatgtaaaacctgccaagcttataaaagggcttgcattgaaacattccctctactctaaccctggtccccagtgtcttagacatttggtccccgtgtttatagggaagtatacagagaagtgttgagctgtgaatgacaggctcctcagaggtaccttgtgcctgtacatgcaaatgcatatgtacatatcccattacttttatttgaatggtagcattctcttcacatgtttgtacctatgtttaattttgctaagcacttggcagcatcacatactgtctataaatagaatcctcatttatgactacacactactttgttacctgaatgtaacatttttaaccagtcacataataataaatataaacataatttccagccttttgttgtatcaaagaagaactcagtatcttgtacacatgtccttttgttcatttgagacacgtgtgtaaaacagcttctcaaaagagtgggggggagtagggagggtcgggggacttttggggtagcattggaaatgtaaatgaagaaaatacctaattaaaaaataatgaaaaaaatcaaatttggaggggtttaaatgtagctaccatctgtaattttgataaatattattaatttgaaaattaaaacaaaatctaaattttttgcatttttattatatattttctttatttacatttcaaatgctatcccaaaagtcccctatattctcccccgactctgcttcctggccctggcattcccctgtactggggcatatgatcttcgtaagatcaagggcctttcctccccttgatggccgactagaccatcctctgctacatatgcaactagagacacagctctgggggtcgggggggaaaggtactggttagttcatattgttgttcctcctatagagttgcagacccctttagctccttaggtactttctctagctcctccattgggagccctgtgttgcatctaatagatcactgtgagcatctacttctgtatttgcctggcactggcagagcctcacaagagacagctatatcagggtcctttcagcaaaatcttgctggcatatgcaatagtgtctatgtttggtggttatatatggaatggacccccgggtggggcagtctgtgaatggtccttccttccgtctcagctccaaactttgtctctgttactccttccatgggtattttgttccccattctaagagggaagtaagtatccacactttggtcttcttgagtttcatgtgttttgcaaattgtatcttgggtattctaagtttctgggctaatattcacttatcagtgagagcatatcatatgtgttcttttgtaattgagttacctcactcaggacactatcctccagatccattcatttgcttaagaatttcataaattcattgtttttaatagcaagtagtactccattgtgtaaatttgtcacattttctgtatccattcctctgttgagggacatctgggttctttccaggttctggctattataaataagactgctatgaacatattggagcatgtgtccttattacaagttggaacatcttctgggtatatgcccaggagaggtattgctggatcttctggtagtactatgtccagttttctgaggaaccgccagactgatttccagaatggttgtaccagcttgcaatcccaccagcaatggaggagtgttcctctttctccacatccttgctagcatctgctgtcacctgaatttttgatcttagccattctgactggtgggaggtagaatctcagggttgttttgatttgcatttccttgatgattaaggatgttgaacattttttcaggtgcttctcagccatttggtattcctcagttgagaagtctttgtttagctctgtactctatttttaaatagtgttatttgactttctggagtccatattcttgagctctttatatatactagatattagtcccctatctgatttaggattggtaaagatcctttcccaatctgttggttgccattttgtcttattgactgtgtcttttgccttacagaagctttgcaattttatgaggtcccatttgttgattcttgatcttacagcacaagccattgctgttctgttcaggaattttttcccctgtgcccatatctttgaggctttccccattttctcctctataagtttcagtgtctctggttttatgtggagttctttgatccacttagacttgatctttgtacaaggagataagaatggatcaattcgcattcttctacatgataactgccagttgtgccagcaccatttgttgaaaatgttgtcttttttccactggatggttttagctcccttgtcaaagatcaagtgagcagaggtgtgtgggttcatttctgggtcttcaattctattccattgatctacctgtctgtcgctgtaccaataccatataatttttatcacaattgctctgtagtacagcttgaggtcaagcatggtgattccaccagaggttcttttattgttgagaatagtttttgctatactaggtttttttgttattccagatgaatttgcaaattgccctttctaactcagtgaagaattgagttggaattttgatggtaattgcattgaatctgtagattgcttttgtcaagatagccatttttactatattaatcctgcaaatccatgggcatgggagatctttccatcttctgagatcttctttgatttctttcttcagagacttgaagttcttatcatacagatcttccacttcctttgttagagtcacaccacggtattttatattatttgtgactattgtgttgtttccctaatttctttctcagactgtttatcctctgtgtaaagaaaggccactgatttgtttgagttaattttatatccagctacttcactgaatctgtttatcaggtttaggagttctctggtagaatttttagggttacttatctatactatcatatcatctgcaaatagtgatattttgacttcttattttccaatttgtatccctttgatctctaattgctctggctaggacttcaagcactatattgaataggtaaggaaacagtgggcagccttacctagtctctgattttagtaggattgcttcaagtttctctccatttagtttgatgttggctactggtttgctgtatattgcttttattatgtttagatatgggccttgaattcctgatctttccaatacttttatcatgaatgggtattggattttgtcaaatatttttttagcatttaaggagatgatcatatggcttttgtctttgagtttatttatatagtggattacgttgatggatttccttatattaaaccatccctgcatccctggaatgaagcatacttgatcatgatggatgatcatgatggatgatcgttttgatgtgtgcttggattcggttagcgagaattttattgagtatttttgcataaatattcataagaaaaaattggtttgaagttctctttctttgttgggtctttgtgtggtttaggtatcagagtaattgtggcttcatagaatgaattgggtagagtaccttctgtttctattttgtggaatagtttgaggagaattggaattaggtcttctttgaagttctgatagaactctgcactaaacctatctggtcctgggctttttttggttgggagactattaatgactgcttctatttctttaggggatatgggactatttatatcattaatctgatctgatttaattttggtacctagtatctgtctagaaatttgtccatttcatccaggtttttcactttcgttgagtatagccttttgtagtaggatctggtgatgttttggatttcctcatgttctgttgttatgtctccctcttcatttctgattttgttaattaggatactgtccctgtgccctctagttagtctggctaagggtttatctatctcgttgaaccagctcctggtttggttgattctttaaatagttctttttgtttccacttggttgaaaatctaaaaaattttaacacattttagttatgtgtctgtacatgcatagctgcacatgagttcagtgccagaagagggcactagatccccaggaagtggagttacagaaggttgtgagctgctatgtgtgtgctgggaaccaaacccaggttctctgcaagggcaacccgtgctcttaaccactggggcatctctttggcctcctttgcccaaatctaatcacattgcttgtctttttaatgctggtccttgttccttgtgtgttatggatagtgaaccttaaccagatggttgttggttactatcttgatagtatcctttgatatgcaacaagctttggattttatgtaatataattaatttgtttggtggtttatggttttggtataacatataaaaatcagtgtctaatattacatgtattagtctctatattttcttctgggagttttatagtttttacccttacattgaattttgtacttactctgagctcatttaaggtgtggagacatgtggacagtctagtactgcttgtagatgaatgtgtgtttctcctttatctcttcacccagagtcatcaatccattgaccatgcactctcagtttttttccatcaatctacacattcatcatgatgctaggatgtcacggtcttgatcactatagctgtataccaggttccagaataagggagtgttaattttgtcccctttattttccctgaaaggctgttttaatgattgggagcccccttgatttctacatggattttaggatcaacttgtctactttaggggcggggagagacacagatttttgacagagattgtactgatctgcagaaccacttgaaagtattccagccttaacagtggaatctttcaaccctgggactgtgccctcttcctgacatttcaggcatctataatgcctttcaacagcagttcgtggttttcaggatactgttggttaaaatttatttctacatatttcatttttgatgtcattgtgattggaattgctttcttaatttcatttccagatgtttagtgctattgtatagaaatacaagtgatatatgcacattggctattcttgggggacttggtgtgtatgtgtctgtgtatatgtatgtgtgtatatatgtgtgcgtgtgtgtgtgagactgtgtgtatgtatgtgtatgtctgtatgtgtgtctgtgtgtgggtttgtgtgtatgtgtctctgtgtgcgtgtgtgtgtgtgtgtgtgtgtgtgtgtgtgtgtgagactgtgtgtatgtatgtgtatgtctgtatgtgtgtctgtgtgtgggtttgtgtgtgtgtctctgtgtgtgtatgtggtgtgtatgtttgtgtgtgtatgtgcatatgtgtatgtgtggtgtgggtatgtgtctatgtgtatgtatgtatgtgtgtgtgtgatcttaaggtttcctggattagcacttttcttgcttgcttctttcatagtatttcctttcctcattgctcaggctagaacctttagtgtgctttgagtggtgtttgtcttgttcaagcttgtggtccatcaccatgaaatttgatgtgtattcagtcctttgtttaactggtgtctgtggagcactgttgagccaggtgctgtgcatgattgtcggggtctccaggtgctttagtctggtggaggtgaggtcaggggtgactgagagggagtgaaatagcgcacgtaagtagtgcacaaaaatagtgcacataaatgaggaaggaaggaagcaagcttaagggcatggcaataagggttgaaaatagagtgggtgaagtagggacgctgagaatgtccccaaggaggcaagagtgacagaggcctcctcaatgccacagtcaaggtcctgcaaagagtctaacaagctatgggaggaacaagggaaactggcccccgaggctggattcagcttgttctaagactgagaaggtggtggtaggaactgagggggttgaagggccagggagaggcacaaaggaaggctaagtctccctggacctaatgcttcctcttcaagataaaaatgttaagtcttgtagcacaagcctttaatcccagcactcgggaggcagaggcaggcggatttctgagttcttggccagcctggtctacaaagtgagttccaggacagccagagctacacagagaaaccctgtctggaaaaaaaaccaaaaacaaaaaacaaaaaaaaagttaagccttcaactctggttgtttctgtctccatagtactgttatactttggatattatatcctaaagaatgtatccagtttaacactgttttacacaagtgtatttcaaggagctataatcaacttccatgtggcgtcctttgtcttgctgtatagccttggctggcctggaactcattatgtatccctggctggccttgaactcacagatctggggtctctgtctcaagagtgctgggattaaaggctgtattgccacagctcagtattcttattttaaaaaatgtgtcttggaaatgtgtgcagaagttcctaatgtaacgactgtttttcctgtccctctcttcttccatgaggcagcacctctttattagtttcttagtgatgccatagggaatattattttatattcatttgtccttggttcaaacttttcatctttcttaatagaatatctagactgttttaattgaaacaaataacttgaaaattttcaaattctaacaatttgactcgactcactgtacaatattcattacatgtctgcattcccagtacattttttttacatttaaattttattttatgttttacatgtatgggagttttgcctgcaaatatgttatgtgccaagtttatgtttggtgcctgtggaggcagaagacagcatcatattccctggaactggagttgtagatggttgtgagccatgtggggactgggaagtgaacctgggttctttggataagcaaccagtactcaaaaccactgagccactcctccaggatccaatatgtgtgtgtgtgtgtgtgtatacatatatatatatatgtatgtatgtatatatgtgtgtgtgtgtgtgtatatatatatatatatacatatatacatatatatatgtatatatatactttaaaaagttgattcattttatgtgtacaaatgttttgcctgggtgtgaggacactgctggtaaccccagctcttgagaggctgaggtagagggatcatgagtttgagtcaggtacatagagagtacaaggccagcctgactacaaagacttgtcgcaagcagcaagcaagcaagcaagcaagcaaggactcgtgatgtagctcaatggtagaatccttgcttttttcttaaagatatttttgaaaaggccaggtgtgttggtccacacctttaatctttgcgagtttgaggccagcctagtctacagctagttctacatagggagaccttatctctctctctctctctctctctctctctctctctctctctctctcacacacacacacacacacacacacacacacacacacacacacacacacacacacaaaggacggaagaaagaagaaagacgaaaaggtaataaaattggtaggtctttgtgaaaacactaagtaactctttttagtccccccatggggactgaggaggtcactcaacaccagaattctataaaccttggcagagaagacaatgaaagatgatgctgactttccttcctaagggacctcagccacatttttcttaatcatattgataaatagaccagccactttcagggcctttcactcacccctgaggcagaaccttgagcaggaaatatgggggagaagctgtgaagttcagggcaggatattcttgacttgtgcttcaagtttacctctagactgtcaggagacatgtgcagaggaagggggcctctgggcaggatgcttcttcctactatggaatcactagctgctgttcctgcttgtcctcagcctctggcctggacccaccaaccttggtggaattgaattgggttaaacagaggaggagctgggagaaagtgggaagagaggaaagcttcaggcgaggccatgtgatgttgttggaagagtcacagggtcttctggctcaaatgtgcaaggaggaagaggtcagagcagccaggaagacatcctgtggtctgtgctatcatgttatcacctatgcaacatcactgtgctcatctaaggtggggacacaggatgcatcaggcttagaagagcagcagggggcagcagtcaagcatgtgtctccaacacaaggtccttgccaccaagcctgctaacctgagctcagtccttaaactcgacatggtgggaggagagcgccaacttctgcaaggtgtcctctgatcttcacatgtgtgaaatggtgcacacatgtccacacacaaacacatgcatacacatacccactctcatacatacaaatacatacatataccacacacacacacacacacaaaatgtaataagcaatttctaattgaaaaaaaatctgtttatacactgttgctttctggtcgtcaccagcatcattgactttgcttctttaatcgtatcactttactaaaaattctgttttcagatttctttatattttttccttaatcaatctctattggattcataatttagatagaggaagtgatggaaactatttctgccttgttcattctttttacaaacaacatcgctttgtggggttagtcacaggcccgcactctttactaatcaacaccaaaataaataggcccttaaaactgtcagtggtatgggccagttgtgaagctggggcacggaggggctgagccagatggccaggccaggctcctaagacacaatgtgtgttctgtagctcttggctacagcaccctgggcagctgagtgctgtcagaaagcttcatgtggaagggaacagattgcccactctctatttgttctgtgggcatctccaggaataaactgtaggatggtacaagggttttctgaccctgactgaacctactggagaccggcaaaaacacaggctgggagttctgtaacccctggctggtcactgccacatcctgtgactgtgttctagtccagaaacttcctttcaggctctctgcctggtgtgtaaagtacaggggcaagtctgttcacttctctgaacttgccagtgatgtagctagcaggtgctgtctcacaaacatgggttcatgttgcatggaggttatgtgttcaacttgcataggctggtagaccagatggagcttccctcctgctccaccaggtgttaacccaccactgcgtagggtgtgagagagagagagagagagagagagagagagagagaaatggcatccactaccaagtatgattcagtggttcattgaacccctggtagggcctctaagagtggctagaatgtgtagagtgtgatgtcctgagcgcctgagatactgtcttagtcagaatttctatcactgtgatgagacctcatgaccaaaaagcaatttggggaggaaagggtttatttggcttacacagacacatcatagtccattattgaagggaatcagaacaggaattcaaacaggacaggaacctggaagcaggggctgatgcagaggtcatggaggggtaccgcttgctgacttgctctcatgacttgctcagcctactttcttatagaacccaggaccaccagcccagtgatagtaccactcacagtgggctgggccctttccccatcaatcactaagaaagtgccttaaaggcttatccacagcctcatcttatgaaggcattttctcagttgaggttccgtcctcttagattactttagcttgtgccaagttgacataaaactagctagcatagacatagtcagtatgctgcatgggcgtgtgagaggggaaagaagagcctctgaccttagagccatcgtcttctccatcacaggacgaggtagttagatttggttttctttttctcttttaaactaatgagagtgtattgcagccatcttctaggtctttagaggaaagactaaagatttctgccactcatctcattgaaagcaagacgctccctggggtttggagacctttgccatcaaaggggcaaatcctcaatggtcaagtgcaaactttggaggggggtgtttttacaagaggatttgttttgatgaagaagagacagccacacaaaacagattgagcagtagccccaatggactttgatagatcacagctataccttttctatttacaccttctctctgggcgttaacaatgagttttggatggacttgtagacttttcttgtggttaaatagctgccctttctttgatttgcatttgtaccccacgacagcccatcccatacactgtggggtgaccccagagttctctgctggagtgaaacaagcttggcacttgcctgtttactgcatctcaacacattagagctccctggcttcaaatagtgtttgaacagaccaaaaacacatttttggctgtcatccagagtttggcttctgcttcccaataaatgccataaaaacgttctgtccaataaattctcaggaactaaaaagaacaaatctcctgttttgtatgatcggagagaatggagacaggtttcagctgaccccctggcgtgctgcccgtggcacaggaaaaccgaatcgcacagtatctcttggcagtgctttcaagtgatcagagataattctctgcacgtgacagatgagccctccacatgagttttgcatgtttatatccactggtgcctttggggtccatgaaatattacctttatatccttctcaattgtatattagtatatgttataaagtgtttgagccttggctcaattttttgtttattaagcttgtagtgctagcaatgggaagaattcctctttgtgtgtatgaacatgtttgtatgtgtgtgcccatgtgtttatgcatgtgtgtatatgtgagtgcagaggggcttttccctagaaatgataaaatccctcccattccgaggtgcgtccagaaagagatggcatattcaaattagagtattcaatcagggtatattagaaagggttcatttgcaaaggtgactttatttcagaagatgtgaatgtgagcaggggcagaaagcgtagtggagaggaacagcagagcggttaccacccctagaccagtaaggggggatggaagggataagatgacctagaaggcagaggcacgtggggatgcagccttcaaagtggccgtcagtacagacacataggtgtccaggctgaagcaactccaccccagggctgctctttctctcccatctctcttctctctgctgagtgattccccactgactgagctcaattcaagccagagttagatcaacaggatctttgttttggcttccagagacagaacatgaacctaggaaggtgcctagaaggtctctgggacatccccactgtgtgcccagttagtgctgagagaggagtctctacagaagtagacttttattgtaaacagcttcattgacatgactaacacgtaataaactgcacagactctaagcatggaagtcgatccactttgatgtgtaactgtacctgtgagaccatggtagtgagtttatcatactttagcatttaaggcagcccatgggcttcttctgcagtcattgcatcattgcatcatgggcacaccctccccccacgtagataagattaaaaaataatgaaaattaaagaaaactgagccaaatgcaagtctgtgagtctatgtggtttgactagtcagcaatttaagtttgagaaaatcagtgctaaccgtgcatttagttagttccagtggaactgtagatttgaagttccagtgtgcactgtatttgatagtcatatacaaaacacatactgggaagtggctcaagagggtgagagatctctggaaggctgtggtctccgaggaagcagagcattgggagggaggaagatgatggtgaagcttggtggctagcttgatatactggagaagagggaacctcagccgactcattgcctccactggcctgtggggccattttcttaattgctaattggtgtagcattggtccttctgtggacagtgccatccttagacaggtggccctagacctctgtaagaaaggtagctgaacaagcctgagaaagcagccaggaagtggtgtttgtctgtggcctctgcttccgttcctgcctcagcaccactccgggacagactatagtcagtctgtgagcaaaataaactcccaagcaccagtcagtggaatgctttttagaaaaggccagtgtcttttcagattatggtttatgcaaagttgagtaagaaacacaagccaccagtttcgtcgtactgttaaataagactttccaaaaaactaccaagtcctcaaagaatagagatgtttcttctaacagatttcaacttttacatgcagtggttttggaatcctttcctttgataaaataaattattggttcctggtgtagtatttgataaatatttgttgaaaatattggtttattgaaatggttttattcatacgttcaaattcgatttgtatcactgaggaatcggcttttcagaatacgcctaagcatccagacccgcagatctgtcccgtgacttaggcggctactttattttctccttcgtgctatatcacgggcactaatccccagttttgtgtttatctctttaagatccatttgggcttacagcattacctcatcatgacctgtcagcccagctgtgttcccctagacgaaaaactcctgccccagcttttaaaggaagcaggctatgctacgcacatggtcgggaaatggcacctggggatgtaccggaaagaatgtctgccgacacgccgaggattcgatacctacttcggtaatggacatgcacacatttctttaacaacacagatctactacagccagctcataaaataacacccaagtatcatcaaacaaaatgaccagaaacctgaacacagtaaatcaggcagcaccatagtggagctgctttcggctgttatccccataagccagctctgtgctgagcgtactctgggcatgcgcgcccacagcaagacgggggggggggggggggggcttagccagagcgctaaggaagagtgttagggacatttatgtcagagaccactgtgcgctctagaatgttcttacctatattgaagttcacatattttccccctatggactgtgttctccaggggaagactagctcaccttacctgggcatcttctcccacctaggagctctgcttccaaaattactaggttggagaagatcgatttaaaaaaattaataacaacaacagaaaaaatggtacaaggaactaaccaaacaataacaagagaaccctctgaaataaatatgaaacctgaagtttgttttaaaacatgacactttaagcctattgtaaactctgccttaatttagttaggttattctaattaaggcagagtttacaataggcttaaagtgccactaactgtgtatctttctgttagggtctttttctattgagctatatttctgcccagctacttagtaaccttcctcctgccatctgcttcttccaaactgaatgcgtacttaacataaagcatctaaatagaataacacaattggagcaaccagtaagacatgctataatttaaatgcactatagatgcatggctctgggagcactccacatctaagatgggagacttcttatgttggaaaggaagagggagggagggagggaggaggaggagggaggaggagggagggaagaatatgcaggagtgtgtatcacaagggtacagtaggtattagggaagagcaaagcttcttccagttcgcagcagtcagaggaacttcccctttgggagaaggtaaaggggtgggggtgggggtagggtctcggtgcttaactctaataaaaaagtgatggctttcttgtagattgtttttaggaatctgtttccaagcaaggtaaggccaaattcagtgcaaaggagcggatctgcatctgccctgaacccatgcggccaagcacttagccctaaagctgaggtcaagatgcaaagaagtcagccaggagagcatgtgtgtccctctccacccgtggcattgcagcaccactggccagccgtgacattatttctagctgagtctaaataagtcttcagtgtccttgaatggctgttagaaatcagccttcactgattaacatcttcgaagatctagaggaatggcctgtgccttgggaacttttttcatgcaggatgaattgatatctgtcctctgatagactgtggatatttagaatctttattaaaatccaagttgcatgcttagcagcctaggtggttggacaggggggcaagagctcactcagtacagtagttgcagcagtgaccttgatttgatccctagaacctgagtaaaaaaagctgggtatcatctaagctttgagtccaggctccaggctcaaggacagtggaggtgggggcatccctggggctcactgtccaggcagcttagcctaaatgccaaaccaggagagaacatgtctccaaaaacaatgggaatagctcctggcaatgatgtcagggttgtcctttgaccaatgcacatgtgcacacacacacacacacacacacacacactaaaaactttacataaagggcagaagtcatattcttgtatgagaattaaggttcaccctggacctggatagacaaatacccacatttgttatttgtctatactggtttggccaagtatttgagttctagctctacagttcttctatttttaatatcatttaatatttatggttcctataaccaaacatatcctgtgcctatatcttccccagtgatagtttatattaatggaaaggagtgtgaagtgttctctccaaattctaatactaagtagatgttaaaaacccaaactactggcttgatcactctaatcaccaaggtaaggttgaggtagttatttgtgtgtgtgtgtgtgtgtgtgtgtgtgcgcgcgcgcgcgcgtgcgtgcgcgtgcgtgtgcgtgagagagagagagagagagagagggggagggagagagagagaacacaaacgtgtagaggtctgagtcaggacagctttcaggagtccgttctcttcttcctctgtgtggatcgcagggatcagactaaggttgttaggtttggtggcaagcacctttcctcattgagccatctcaccagccctgaaattattttttttgtgaatacaattttttctattccatattaagtagtaaatatgttggatttatttcctataaatatagataaaatcacacaataagttatgttgatgtcatatactaattatattcaggaccttgaacttatttgatcatgaaaaatagttaatctaaaatcaattgaattattacataagctgtataagactctttaattgtcactgtatacaaaattcatgagaaaggaaagagctaggcccatttttcatcattttaagactaaaagggaatatatttaagaatatagctaagagctcatcaaagtttatttctttttaatagctttattagggtataattcatatactatacagtttacccaattaacgtatttaatttagcgatttttaaacaatgtgagagattgtgccattatcaccacaattcagttgtaggaaaccacacacacacacacacacacacacacacacacacatgtatgtcacaaaaagaaaccaaatcccatgagcagtcatcacgggcctccaggcaaccagagccctgggccatccgtcactaaccactttctgccctctgttgattggccttttctgagcaagtctgtcaatttaatcataatatgcagcccagcttattttcacattttcaaaacacgatcacttgcagaacaacgattagttggggcgtttctgtttctcctgtgctttcctctttgttatgggatctgggctctagaaacaggggagttgacaggccactgggctcagtaagcactgcatctctgagcagcggggcaaggttcacagtctagacagaatgctgctctttgatctctggggctgctcagctgggatagagagcttgtattaggaaaggtttatatttttccaccagtgggtgtcagcatttgactaaatataactccggcaaaggccccgtccataaataaccacagaaatccatctcccaacctcagtagcaacaaatgacacgatctgaaccctgtttttagtattttacaagtaaaaccttgtaacacattagtggtgcgttatcttttttcttaggcaattttaaagaattagcatctggttgcttcctgaacttaaactctgatttctaaaaaccttttcccacagatcaaccatgtataaagagttgacaagcgagaacagatgctctaaaagactcaagtgaggaagggccttggatttccatgtagtgccatttcagtggtgtctctaacaaatatagagatgttaagaagagaaccctgattagccctgtcatttgattagcctcgtcatgggcaatcagttgcattaggcaattaactgctggaacattcgtttgcctaacaagctttctgccatgccgactgtttcttctcccattcttcttgcaggatacctcctaggcagtgaagactattacacccacgaggcctgtgcgccgattgagtctttgaatggtacccgctgtgcgcttgacttaagagatggtgaagaacctgcaaaagagtataacaatatttactcaacaaacatatttaccaaaagggctacaaccgtcatagctaaccacccaccggagaaagtaaggcttcctcctttaatattgtcaaaatcttgttgcttccaagggagtgtgtgtgtgtgtgtgtgtgtgtgtgtgtgtgtgtaatataacattttagagcatgttccagttagccagaaagggaaggttgttagaagtgaagaatttggatcttcctcaggtctgggagaaagtacttaggaacgcccaagagatgagtctcacaggaagggaccctgggctgcagatggaggaaggctgtctgtccttcagcatttcagtggaaaccctgctcactcttatgatgctttatgtgtgtgcacagtaagtggttagcaaaatcaggcttcaggattccagacaggtgtctgtgctcgaggcagggctccgttgggaagaagtgttgggaactcaggggctagagaaaatcctctcattctatatttttctcttcaggattattttggttagtcttaatcttttgtatccccatgctaattttagagtaggttgaccaatttttactaagaaaacagaagttggctgtttgattggttggtattcactgaccaacttaatggaaatgaccgtcttagcaatactgggtttttacaattaatatgcatggtatattggtttttacagacaccataggcgcctatcaggtatgtcacgtgcagacttagctgcaggtaggaagagagaagagttgtgagaagtcttaaatgcaaattgtctggattcagcacataggtgctttgggaacagagcagatttttgtgttgtgagacactgggctcaaagcgtgtccttatgaagaattgtattagcacactcacaaaaattggccttcagtgggacatggaaaatttgagaaagtgtccaggtccttccagttctctgcactttgtctctttgacgatgcgtgaaccctcagcaggcagggttctggcttgtgtatctgttcagacttagtgacctgctaatgactctgtctgctacggaatcttccaagctctgtcttctatactctcagtcagtatgagggattctccctggtggctgttctcagttttgccatactttaggtacttaagagctgacatcgtcacctgacatctctaggtaactatgtctgccatgaaacatgaagaaaggggagcattctctcaaatgtttagaaacctgcacattttaagtctagatttaaaaccagaatggttggtgggctaggaaggtggcttcatataacattaaatggataagaagatgcaactggggtgaaatagttctgtggggagggggagttataagctgggggctgtggggaaaggcttgaaaccaaggacaacaggaggccctaagagcccgtgcaccacaaagaggtattgttagcaatggtgcctcttgctggctgtattatagctcttaattgtatgtgaggcattttatggatatggcctaataccaagaaagccaaagtaaggctttcagggaactctttattatcctttgatagaaggatagaagacacgctgtttgtttaagcaaacaggcttggagaaatgaagtgacttgttcaaagccacgggactgtgtgaagtcagagtcaggatgtaacctctcactttggactccaagagcatctgcctttattcgccatccctagtcacagctcgtgcagagatgttgaatcccagttcatattcagctccacagtcccggtcttgacagcatattaggacctcctgggacatttggaagaaatagtgatatcagatattgtaaggcattaatatttcatccccttatcagtgattctccgtggtgtccatggtgccgctatggagatcctgtgcactcaggatggttccgtgagtgttagcttgatgctctcacaagtacaaagacaagcagatgccagcttgctggtattacgggctcacaatctgatctaatcatgcaactctatgcagcagagataagctgtgcacaatacaaagttattcttactgcctggagatgctcagcacacacaagtcttaatgagcgttctgcttgtctacgtgttcagacacagtgacctgccagtgactccttgtctgtttagaaccttccaggctccatctttgctattttactcagtttgaggaatcttccctagtgactgttctcatctcccctggtgactggtctcggctttgccacactttggatttttaagggtgtaatgctgacatctctaggcaactatgtctgccatgaaccatgaagaaggggagcaatctctcagatatttagggatgtgtacaaaacagtattgtctcctggtgccctcataccaccaagcagctaccaggaagcgtctgtggagaagtggttccttgtgggtgggcagttaaactgggctggtggagaaggcaccagaaccgaggacagtcacaggccttaagagctcacatcccatgagaggggtgctgttaacatggcactgctcatagatagcgttaccaaaatcaccagatgggagatggacatttcctgccagcgcgtgggatgctctgaagaggtaatcagcatgctcagagcccccaagcacagactaaagtaaaagaaagaatagtcatgtagcaacccagccgtttccacaaggcagctcctgcacacagatgctcccggcttcagctctccagacagtgatgcgactcactggcttcaggagctgcatctttgtaacatctttccccaggatttaacctaattctgtgctaggctctcaggtgcctagagcatcatgtgtagattgtaacatgacatttgttctaagatggaagtcattcaaagaattcacaggaagtgttcaccaaccaactaacgtgtacttgcttttaaggggcagctgagggagaaaatcgacagagctgccgtgtaacagttgagctgttgattctggggacgctgctaatggctttacatgtgtcaggaagggacatcctttctcctttatgtgagggtgactcacatagtagtagcactataaaaagaaagtcatatattcatagcatgactttctgttaaaattagaacagcagcactttgaagaacttaaaaaaacaaagaaccctctacatctaatctactagaagcttcctaaggaaaacaaaacaataaatcctagtggaagactttctttgtgtgagtacaagctgggaagaaatgtcttaatttggttgtcaaagatagaatagtagtttaaaaatgtattcctgtttttccaatttatactttgatttagggagccctctaaagacataaaaatgagtgatatgtggtttcttcccatagtgcggatgtttagagttcagatcttaggagccatggagcagaacagaaaagggaaaagatccattagcatcctcaatgtacgtatgcagagttaagtctgggttttatgtgatactatagtgtctagacacgctttccaaaccaggattccattttatagtcttaggatacttgaaagggtcacagttagggttggggtacagttggcagctatgactgagctgatcggaataagagtttgaaatcaagaaaataccaaggacataccaggttctaagaaacagaaatcaaagctgggtagtggtggtgcacgcctttaatcccagcacttgggaggcagaggcaggcggatttctgagttcgaggccagcctggtctacagagtgagttccaggacagccagggctacacagagaaaaaccctgtctcaaaaacaaaacaaaacaaaacaaaacaaaacaaaacaaaacaaaacaaaacaaacaaaacaaaacaaccagaaatcagtggaggttaatgtggggcaggacttcagtgtgaatcaggagtcagtgaggtgagaaggggtctctctccaaggccaaggacctcatgtccatagatacacatacaatccccagatgaaggctgtttgctttggccagtggggagaaactggctacagcttttctctgggaggaccccaccaactagtgactgcaggtatggtcctgatggtggttggagaaccttctagccttagataatcattcttttcatgaggctaccatgcagcacagactaccagtctcccctccctccatcatttaaaattagtacagtggggctggagacatggctgactgattaaggacactggctgctcttgcagaagacctggttcagttcccagcgcccacatggtagctcacaactgtttgtaactccagttccaggggagctgatgccctcttctgacctctctgggtactgcatgcacatggtgcacagacatatatgcaggcaaaacactcatatatatgctatcgtaatgcttctacttggtgaggttggagaatgggttgtccatggatgaaattcaccttctgagtgctaaagacttgatttatagtagtgatataaatatacaaaatggctgaatgtggtatcacacacctttaacccaagcactgggaaggcagaggtaggtggatctctgtgagttctaggccagccaggccacatagagagaccctgtctcaaacaataaaacaaagtgggtgtcggagagcatattaaatgtgtttgattggtcctaacctcatgaaatggattggacacagctcttggtgacccagagctacgcaatatatggaattgttcaccccacagcaaagtgctctggactgctcaaatgaactggaagaaaagacaactttgccgggctgtggtggcgcatgtctttaatcccagcactcaggaggcagaggcaggcagatttctgagttcgaggccagcctggtctacagagtgagttccaggacagccaggactacacagagaaaccctgtctcgaaaaaacaaaacaaaacaaaaaagacaactttttgttgttgtctttcaaagaacacttgcatctcttcttgtgaattatgacgttatgatcaggtcagcaaacagtgtgaggctctcacatatgacagtcacctgactggccagcttcaacttgatccagagggaccccagagtgtcaaatggccagtctgggtagcgtggaaagtgtgtgtgtgtgtgtgtgtgtgtgtgtgtgtgtgtgtgtgtgtgtgtgtgtgtgtggaggagcagaggcagggtcagaagtgttgatatagactttaagaggaggaacttgaaatacttttcatggaaaaagtgtacatttaattttaacatttaattcaaaatgtctgaactccagataaacgtaagagtatctcttagagctccctgtctggacagtccccactcttatcatatcttttcattccccgtaactggttggcacacactccagcaaagggttgtgtaatttagaacaatttgcaacaataaaaagtgaagtgagtttcttccttctgtcttttttccttcatttatgatttaaatacctcacataaatgtgcttattcttggatcaaagctattgattattgtctctttgagggtattaaacatatgagaaattctatacggcatggtgcagggctatctgcagagaggcccctaaggagaagggctgacctggaataccacaagtgctgactgttctaagctggcatagagaaaaaccagaacctgtggctcacacttcttatttctaggaattaaattggcatcacatttatttggttcaatatcaaaatctaacaaaacactgtttccccagaaaacatgttaaagaaaaccctgtacactctctttatttttagctcacttatctgttggtgcatggcaacattgtaacacggagggtaccaggagggaagcctgcatcaaacagtggcacctgggcatacctaaccttttaaagccttggttaactcatttgaaaaatggatataacaggatggttttgagtgttaaatgagatagagtagtcagattattatcagagggttttcttttttttttttccattttttattaggtatttagctcatttacatttccaatgctataccaaaagtcccccatatccacccacccccactcccctgcccacccactccccctttttggccctggtgttcccctgtactggggcatataaagtttgcaagtccaatgggcctctctttgcagtgatggccgactaggccatcttttgatatatatgcagctagagtcaagagctccggggtactggttagttcataatgttgttccacctatagggttgcagatccctttagctccttggctactttctctagctcctccattgggagccctatgatccatccattagctgactgtgagcatccacttctgtgtttgctaggccccggcatagtctcacaagagacagctacatctgggtcctttcaataaaatcttgctagtgtatgcaatggtgtcagcgtttggatgctgattatggggtggatccctggatatggcagtctctacatggtccatcctttcatctcagctccaaactttgtctctgtaactccttccatgggtgttttgttcccaaatctaaggaggggcatagtgtccacacttcagtcttcattcttcttgagtttcatgtgtttagcaaattatatcttatatcttgggaatcctaggtttggggctaatatccacttatcagtgagtacatattgtgtgagtttctttgtgaatgtgttacctcactcaggatgatgccctccaggtccatccatttggctaggaatttcataaattcattctttttaatagctgagtagtactccattgagtagatgtaccacattttctgtatccattcctctgttgaggagcatctaggttctttccagcttctggctattataaataaggctgctatgaacatagtggagcatgggtccttcttaccagttggggcatcttctggatatatgcccaggagaggtattgctggatcctccggtagtactatgtccagttttctgaggaaccgccagactgatttccagagtggttgtacaagcctgcactcccaccaacaatggaggagtgttcctctttctccacatccacgccagcatctgctgtcacctgaatttttgatcttagccattctgactggtgtgaggtggaatctcagggttgttttaatttgcatttccctgatgattaaggatgttgaacattttttcaggtgcttctctgccattcggtattcctcaggtgagaattctttgttcagttctgagccccattttttaatggggttatttgattttctgaagtccaccttcttgagttctttatatatgttggatattagtcccctatctgatttaggataggtaaagatcctttcccaatctgttggtggtctttttgtcttattgacggtgtcttttgccttgcagaaactttggagtttcattaggtcccatttgtcaattctcgatcttacagcacaagccattgctgttctgttcaggaatttttcccctgtgcccatatcttcaaggcttttccccactttctcctctataagtttcagtgtctctggttttatgtgaagttccttgatccacttagatttgaccttagtacaaggagataagtatggatcaattcgcattcttctacacgataacaaccagttgtgccagcaccaattgttgaaaatgctgtctttcttccactggatagttttagctcccttgtcgaagatcaagtgaccataggtgtgtgggttcatttctgggtcttcaattctattccattggtctacttgtctgtctctataccagtaccatgcagtttttatcacaattgctctgtagtaaagctttaggtctggcatggtgattccgccagaagttcttttatccttgagaagactttttgctatcctaggttttttgttattccagacaaatttgcaaattgctccttccaattcgttgaagaattgagttggaattttgatggggattgcattgaatctgtagattgcttttggcaagatagccatttttacaatgttgatcctgccaatccatgagcatgggagatctttccatcttctgaaatcttctttaatttctttcttcagagatttgaagtttttatcatacagatctttcacttccttagttagagtcacgccaagatattttatattatttgtgactattgagaagggtgttgtttccctaatttctttctcagcctgtttattctttgtatagagaaaggccattgatttgtttgagtttattttatatccagctacttcaccgaagctgtttatcaggtttaggagttctctggtagaatttttagggtcacttatatatactatcatatcatctgcaaaaagtgatattttgacttcctcttttccaatttgtatccccttgatctccttttgttgtcgaattgctctggctaatacttcaagtactatgttgaaaaggtagggagaaagtgggcagccttgtctagtccctgattttagtgggattgcttccagcttctctccatttactttgatgttggctactggtttgctgtagattgcttttatcatgtttaggtatgggccttgaattcctgatctttccaaaacttttatcatgaatgggtgttggatcttgtcaaatgctttttctgcatctaacgagatgatcatgtggtttttgtctttgagtttgtttatataatggattacattgatggattttcgtatattaaaccatccccgcatccctggaataaaacctacttggtcaggatggatgattgctttaatgtgttcttggattcggttagcgagaattttattgaggatttttgcatcgatattcataagagaaattggtctgaagttctctatctttgttgggtctttctgtggtttaggaatcagagtaatagtggcttcataaaatgagttgggtagagtaccttctacttctattttgtgaaatagtttgtgcagaactggaattagatcttctttgaaggtctgatagaactctgcactaaacccatctggtcctgggctttttttggttgggagactattaataactgcttctatttctttaggtgatatgggactgtttagatgatcaacttgatcctgattcaactttggtacctggtatctgtctagaaatttgtccatttcgtccaggttttccagttttgttgagtatagccttttgtagaaggatctgatggtgttttggatttcttcaggatctgttgttatgtctcccttttcatttatgattttgttaattaggattttgtccctgtgccctttagtgagtctagctaagggtttatctatcttgttgattttctcaaagaaccaactcctcgtttggttaattctttgaatagttcttcttgtttccacttggttgatttcacccctgagtttgattatttcctgccgtctactcctcttgggtgaatttgcttcctttttttctagggcttttagatgtgttgtcaagctgctagtatgtgctgtctcccgtttcttcttggaggcactcagagctatgagtttccctcttagaaatgctttcattgtgtcccataggtttgggtacgttgtggcttcattttcattaaactctaaaaagtctttaatttctttctttattccttccttgaccaaggtatcattgagaagagtgttattcagtttccacgtgaatgttggctttccattatttatgttgtaattgaagatcagtcttaggccatggtggtctgacaggatacatgggacaatttctatatttttgtatctattgaggcctgttttgtgaccaattatatggtcaattttggagaaggtcccgtgaggtgctgagaagaaggtatatccttttgttttaggataaaatgttctgtagatatctgtcaggtccatttgtttcataacttctgttagtttcactgtgtccctgtttagtttctgtttccacgatctgtcctttgaagaaagtggtgtgttgaagtctcccactattattgtgtgaggtgcaatgtatgctttgagctttactaaagtgtctctaacgaatgtggctgcccttgcatttggtgcatagatattcagaattgagagttcctcttggaggattttacctttgatgagtatgaagtgttcctccttgtcttttttgataactttgggttggaagtcgattttatccgatattaaaatggctactccagcttgtttcttcagtccatttgcttggaaaattgttttccagcctttcactctgaggtagtgtctgtctttttccctgagatgggtttcctgtaagcagcagaatgttgtgtcctgtttgtgtagccagtctgtaagtctatgtctttttattggggaattgagtccattgatattaagagatattaaggaaaagtaattgttgcttccttttatttttgttgttagagttggcattctgttcttgtggctgtcttctttttggtttgttgaatgattactttcttggttgttctagggcgtgatttccgtccttgtattgcttcttttctgttattatcctttgaagggctggattcgtggaaagatattgtgtgaatttggttttgtcgtggaatactttggtttctccatctatggtaattgagagtttggccgggtatagtagcctgggctggcatttgtgttctcttagtgtctgtataacatctgtccaggctcttctggctttcatagtctctggtgaaaagtttggtgtaattctgataggccttcctttatatgttacttgacctttctcccttactgcttttaatattctatctttatttagtgcatttgttgttctgattattatgtgtcgggaggaatttcttttctggtccagtctatttggagttctgtaggcttcttgtatgatcatgggcatctctttttttatgtttgggaagttttcttctattattttgttgaagatattagctggccctttaagttgaaaaatcttcattctcatcaattcctattatccgtaggtttggtcttctcattgtgtcctgcattacctggatgttttgagttaggatccttttgcattttgtattttctttgactgttgtgtcgatgttctctatggaatcttctgcacctgagattctctcttccatttcttgtattctgttgctgatgctcgcatctatggttccagatctctttcctagggtttctatctccagcgttgcctcgctttgggttttctttattgtgtctacttccccttttatttctaatatggttttgttcatttccatcacctgtttggatgtgttttcctgtttttctttaatgatttctacctgtttggctgtgttttcctgcttttctgtaagggcctgtaactctttagcagtgctctcctgtaattctttaagtgacttatgaaagtccttcttgatgtcctctatcatcatcatgagaaatgtttttaaatctgggtctagattttcggttgtgttggggtgcccaggactaggtggggtgggagtgctgcgttctgatgatggtgagtggtcttgatttctgttagtaggattcttatgtttgcctttcgccatctggtaatctctgaagctagctgttttagttgtcactgttaagagcttgttcttcaggtgtctctgttagcctctataagcagacctggagggtagcactctccttagtttcagtgggcagagtattttctgcaggcaagctttcttcttgcagggcaggtacccagatatctggtgttcaaaccagactcctggcagaagttgtgttccactcactagaggtcttaggatctcgtgtggaatcctgtgtgggcccttgcgggtgttgggcaagactctgctggcaaggtagcccggggctcgagtggggtggaaggggtttgtgccccagatcaagcccgggtagcctgcttccctatgtaccgcagtctcaggttccgtgcgattggattggggcaggcgctgtgttccactcaccagaggtcttaggatcccgtggggagtcccgtgtgggcccttgcgggtgttgggcaagactctgctggcaaggttgctcggggctcgagtcgagcggaagggacttgtgccccagatcaggcccgggtagcctgcttccctatcgagggttttcaatataaacgtttcaatatgtggtgggtcaaagccttctgccccattctaggactttgaccttcatgttttgttttgggtcttgtcatcttttgaacatatttactgagacataatttgcatatcataaaatccactcacttaaagtattcaattaactggaaatttaagaggcatctgatcatcaccatgatctagttttaaaacttctcaccactcttgaaagaaatttctacctagtagtagtcccttgtcatccttttccccagaattccccaaaggcacagatatccactcacctccttcctgtctccatggacttgcctctttggacttcagaatgttttaatcaatgcaacaatgcaaaatgtggtctctggctcctttctcttcacgattctaaaggccagctgtgttgtcactgattatttagttggtatatactgtgattaaaaaatattctgaattttatttttgcatccatcaactatgagcattgaggctaattcttggccattatgaacaatgttgcagtgagcatcccatgagcgccctgtgcatttcagaccggcatgtgctttcctggtgttctaggtgtgggagggccttgctgtatggtagctgtgtgtgatactaaggaacttcatgctgatttttcagtgcctgtctatattactttgcattcctactaactaatttctccatagcttcgtcaacatttttgctttctattttaaggactctaagcatcctaatgagtgcgatgcggtgatatcttactgtagtttttgtttgcagtcccctgtgtgtgaatatttgttacaaatcatctttggagaaatgcctatttaaattctctgtaccttttattgttgaattatttatatactctggctacgagctccttatcatacataggattcagagatagttaggtccactctgtagattgtcttcacagctattgatatgaactgagaatctcggctgtctcatgtgctgtgtttaaagcttccgttccttttaaccgacatttggttttcaaattctctttgcagccactgttcctctaccttgctttccagtctgtccacgatcccctgcaggtccctgaggagtacatggagccatatggcttcatccaagataagcacagacgtatttatgcagggatggtgtccctcatggatgaagcagtggggaacgtcaccaaagccttgaaaagccacgggctctggaacaacacggtcttcatcttctccacaggtcagttcaccagttcgggaaatccgtctctggtaaaccctaggatgtgtcattcagtaggtagaatgaagacagactggagaagtttagcatttgccccggaaataaatgccaagtgctgtagtggagcctcggtcacagtgtgaacaaggaaggagagctgcaaacctttcctccttttgtttgtattttataacacaccgggagtgtacctggagacctggactcactaactgagtgagttagcaggcaccacatatccacagggcaccaggatggcagctcctcaggtgctggtcaccacagccctctgctgtggctgcatgactgctgctaactaaagtctgtgtcctggcagagacaggttggggcactgtaaagccagattaggaaaggagcaaactaagcttagtctagagtctccaggtgtaagctttttttttttttttttggcattaaaattgttttctgatgacacacattcaatagaaaaagtaagagagaggaaaaaaaaacagtgaaagaaaaataaaaccctctgtggccagagatggttggagatcaccttcacgtagtcaggctaccagagatgagtcttctaacattcttagtttcttgttctgttttccttacatttcttttattgcttggaaaatttacttaccagtctttcctaaactttgtgttgaattcatctcaatcactgtttttataagtcactgagagctcttagttcctgataactcctttttttttttttgctttatagatgtaaaaagtttgatgtgagttcgaggtcagcctgggctatacagagaaaccctgtctcggacccccacacccccaaaaaagtttgatgtgtgtgaatgtacttgatatatgtaggatacatatatctgtatatatccttaaagtttgctgtgttgacaatattatctaagtttttccctagtatctttgtatttttgcttacgtcagtatttcaaaacctcagctaacaccaacctggcagtctcatgcgagaaatcagagctattgttcagcaagttttactgaaatgtcacagtgtaggggtgaggccacatggagaggagtcatcttgctggtctcatggttggttttggtgtcctgttgttttgctttgcttttaattaagtatagctatcaaatctagtgggtttaagcacttactgtatacaagacaattttaggagcctcgaatggttacgtttaacagccctcactactagtaatccatccctgaggactgtctcccccccccccccccccatcttgcagacctgagaactagatacaaagaaacatttagccctgggtcacatagccacatttgggcattgtctggatttgtgtttcagactcttctgtggcattttctagcctcaaggatggcagtctgtttggttatttgagacaggatctggttgccctatagtcaagccaatctgaattctcagtcctcctgccacagcctctgcagtgctggcattatatgagttcaaccccacccctggtgagagctgtttctatggtgggctgcagtgatgggctactaaggacccaggcagggtgggttactgagcagcttgtatagttgctttagtgccatctaaatactctcattttctaagtgctccctgtattgataaggcttgaatgtgatgatttttttcacacaaaaaaaaaaaaaaaaaaaaaaacgcccaaacaaacaaaaaaagaagacatcttagattaattctttacagagtcttataatcttggcgtcagcctcagtttatttcatttaaaaagaaaaaaaaaaacaaccttctatagtgtttttgatcagggttggtgttgaaggccttgtagagtctctgcagacaatgaacaaaaaggaggtcaggacgcttaatacagatttagaaattattcttgaaaatgccagcataatcgcaaaaacttgaagactttaaatgaaaaaatccaagcctctgttgaaggcatcatgattgcacagtgtctggacagtgtctttctgaggatggtttagtatgttactcaggaactaaaaagggctcagaagtgaagatgttcactctggaaactgttttgtttttgtttttgttttataagaagggcaatggcagccgggcggtggtgacacacgcttttaatcccagcacttgggagacagaggcagccggatttctgagttctaggccagcctggtctacagagtgagttccaggacagccagggctacacagagaaatcctgtctcgaaaaagtaaaaaaaagaaaaaaaaaaagggcaatggcaagtggtaactggatttctttcttttttaaaaattttgattagatattttcttcatttacatttcaaatgctgtcccctttcctagtttcctctccgaaagtcccctatacccaccttgctccccaacccacccactcccgattcctggccctggtgttcccctgtactggggcatataaagtttgcaataccaagggacatctcttcccaatgatggccaactaggccatcttctgctacatatgcagctagagacatgagctctgggggtactggttagttcatattgttgttcctcttatagggttgcagatccctttagctccttgggtgctttctctagctccttcattgggggtcctgtgatccatccaataactgactgtgagcatccacttctgtattttccaggtactggcatagcctcacaggagatagctatatcagggttctgtcagcaaaatctttctggcatagtgtctgggttggtggttgtttatgggatggatccctgggtggggcagtctctggatggtccttcttccgtctcagctccgaattttgtctctgtaacttcttccatgggtattttgttccccattctaagaaggaagtaagtatccatactttggtcttccttcttcttgagtttcatgtattttgcaaattgtatcttgggtattctgagcttctgggctaatatccacttatcagtgagtgtatatcatgtgtgttcttttgtgattgggttaccttactcaggatgatatcctctagatccatccatttgcctaagaatttaataaattcattgtttttaatagctgagtagtactccattgtgtaagtttaccacattttctgtatccattcctctgttgagggacatctgggttctttccagcttctggctattataaataagaccgctataaacatagtggagcatgtgtccttattacaagttggaacatcttcttggtatatgcccaggagaggtattgtgggatctactttggaaactgataactatctcaaagtgattctcacgggaatacagacattggtatcaagaatgtctgggaaaagatgggataattttttctcatgatatgtgagaatgaaaaaatatttgaagatcaatgtttcttttgttccatgatctcagatttgtgtgcatattttaaatcattttataaacatctgtagcattttattcaatttggcaaaaataatatttgaggcttctcactgaaagcatggtggttagctgacactagaggtgtctcctgccctgagactctgatggcttagcaggtgctaaggtcttgggtcgcctttgctctgttgggggcagttggattatgactgtgtgcttgtataatgttcccaatttgatttagtggagtttttgttaggatttttacatcagtccacaagtgagagtggagctggtttcctttataccggcaggctctgttgtcttggttaaattcatgtggtaaaataattaggatgttttccatgtctcgttctatggtttgagttagtaggcgatccttagaactttctttgagggcattttaaaagttatctccagagtttaagtcttctccttactcatgtctggatgtgaggcgtccggtgttgtaaacatggatgaagcctgagatccggtgactcctgtgattgcaccgccacgggattcttctttcccgtaagatttctgtgtctgcccgcgtttcagctcattgcctttattctgtttgacttatgggaaaaccagaccttaacaggatgacttgctaatttagcctcttttcttatcttatttctttctggctttctgtcctttcccccggtccccccaccccaccccccactcctctgcgccaccagctgacagacagtcttgccattttgatcagcccttcagtgaccgggtggaggtgattgtgactgtatctttagcatctctgcagtccgctttccttggcctcggtgccctcctcactgaatttcacggtagacaggattttcactgttacagcttgactgcatgcccagcccccctctattcatttcctccacttgcttatggtgtaaatgggacaacttgaggttatcctgtgagctggttcccagtccccattttatcaaagaaggaacccaaacttcaagaagctacaaggttagcctcatgtcagacacacaagagagtcagaattcaaactcggatctcctggagtcaatatctaactgctaatcagttgtcctcttcagctcatctcgtggtctttcatctctccttagcttcctcagcatctgttcccaaagccagccttcccccaaatcttttaaaggagaattctagaatctttgtttttatgtcaaatcattgccagctgtctattctttctctgaatgtgagtgatatgggggtctagaaagactacacagcacgtgtggccaattctatcccacatctgtgtcttgtcttgtggtcaggtgatgcacacagcttactgagttaccaggactggagtgaagtgtgttccaccttgcagaagccatttgaccaagttcatttccttctcttgtggccaccagttcttctgccaaccaaaagcaccttgagtgtagtgacctggctctacccagctctgccccgttaacgttttacttttgcatatggcccaggagacgagacctcttagctatgtatagaagggtaaagaggtaatgactctttggttgtgcacaaaattatcactcccaggttttctcttgcctcagttcaggtaggtggagaagctgctgtccagagaccaaggagtgtgtgggtcagccctgttggccttaaaagttggggaacagtttcaagattctagcattctctcactgtcttcccagtgtcatgtcctgagctatgatgtgattccagccttctctgtttgtttttagctagatattggctaaaggaagacgtgctaggaggataagatggtcactagatgacacacaccctcccccccacacacattacagctcatctttttagctgctaaactccaggagtctgtacaaaattcagttccaagtaaggctactcaaaagtgacgcccttttctggtttctgtgggcactgtactcacatggtgtagtcacatgcaggcaaaaatccatattcataaggtaaaaataaacaatttttttcttaaagttaaggctacaagcttgaatttaaacattgtgttcttcatgccacactgatataaattaccattggctgattcacgtcatcctggtatgaatttagtttgtttgtttgttttctgtgctggggtgaaatcaggagtttcacacatggtgtagccagcttaccgcttggctacagccccaccttatccatcctttctgcaatatgggatggattttactgtaagcaaatattgcttgtctcattacacgtggaccattgtgttctttatatagcagtgacccttttgtccttctttgatagcatgtgatcagagtttgggtcctcctattcctagggatattgatagcttgatagcgtgcagtctgcagtgcttgggcaatcttgacagagattggggagcatttgcagagagctgtcaaagggtgcagcctgtgacgtgctctggcacacatgtagtctgtgaggcagtaggttcgcaggctgtgggttcatagtgcactcgggttgtagacctgaggaatttggaatgtgtggggtgggcctgggccgttctgactttacagtgaagttgccattcactgaggggctctgaggtgctcgggtctgcgcttacatggtggagaaagttcttatccatgatgtcagtggcaccttaaacaccagaacctgtccattttttttatgcaggattcccttcaggatgggtagctgacagtagcatagagtgctgttccatagctttaagtatgctgtacagttggcagatttataaaatagcataggactcttgctaagaacaagccgtctgcctgctagccagctctagacctgtaagtgaatgtctcacaaaactgagaactgttaactgaataaaccaggtcacactgcacaccactgctcaccttgctgtgacatatgcatccaacacatgtctgacaaagagagaatatcagtgagtaagtgggttggacctgtgagaccggagtgacctgtccttgagccagctattgatccatgctatctcttgagatgttgcgtattagtgtctgcacaaagagcgtgttgggtcacttgaaacttttactcataaggggtgttcacttactgatgactacactgagggaaaatgatagccaatgtactttaagggctctagaccagtcttgcttttagtgtctctgtgacaacccactgaatcctcgatctgtttctacggaaaggacgcctctcaactcttacgtttatagattgccagtgttttattatattacttaataggtgcaagaatatcacatcgttgatattttgaatttttgatttgtgtaacatgagataatgaacattctcacacttctgtgggcagatagtaccgtggcctttttgagttcattattaatggaagagggtattgaactgggcacatttattgactaaattgcaggaagctttctaattgtttcgagttattttctccgctccctttgtgtttcattttaaaggtcacagttatgatggctctgtttctgactagtcccacaacttcctgtggcttcagctccctctgaggccagaggggtcttcggttgcacaagcttcacaggaagttgagtgaggatgaaggtagattatagagagtggaatgagaacctagaaagcgcaggtgtacaaagtaaagccacggcgcatgcgccacgccgtgccgttcacggttgtctggtctgttcacatctgtgtgtcctccagtaacagcctcagcaagtgtttccagaggttactcctatcaatcaggctaatcgataacatataactgtccactctgcaaagcagtgttacttggacaatgtgttgcttggacaaggtagtcttgtccaaacatgactgcaaggatgagctgataacaagattctacttcggaggaaccaagtaaagttaggaactagttcagaaaggttctggtgaaccgcagctcggaggaacccttgagatgagtgcgagcggcagctgctgtgagagtaaccagcagttgttggggtgccgccttctttctgccagtcagggccccagcccgtgggtggtgtcgcctctgttcagagtgtcctccctccttggttagaaggacactggtcaacactactcagaggcgtgattctgaatccgtgtcaggtggagaatggaaactgtgtcccttgtcagctccatcaatcatgtccctttaaattataacattgtgtccctgtcctctgaaagagtcacgtgctgacccctgatttacacataaaaaagtttcaagttctgcctccaagagcttaagacaagccatccaaccaacctgctagtagtatatgacttttttttttattagaaaaagtatttgcttttattagtgtttataaagcatccagagtaggataaagtttatcatttatgactatcattttcatttttttccattttttaattaggtatttagctcatttacatttccaatgctatatcaaaagtcccccatacccacccaaccccactcccctacccacccactccccctttttggccctggcgttcccctgtactggggcatataaagtttgcaagtccaatgggcctctctttgcagtgatggccgactaggccatcttttgatacttatggagctagagacaagagctccggggtactgcttagttcatattgttgttccacctatagggttgcagttccctttagttccttgggtgctttctctagttcctccattgggggccctgtggtccattcaatagctgactgtgagcatccacttctgtgtttgctaggccctggcatagtctcttcttaatttaagaaaattattttgtcgctaggctgtggtggtgcacgcctttaatcccagcacttgggaggcagaggcaggtgggttactgagtttgaggccagcctggtctacagagtgagttccaggacagccagggctatacagagaaaccctgtcttgacaaaaccaaaaaaaaaaaaaaaaaaggaagttattttgtccctccctgactccagttgtcactaatggaaatgcacatgagcagtatagaggccagtgttggtagccagaggaagaaagggccaggtaacagtagtttattattagttagcagaaagtggatgggtgggaggtgccctgggtctggagtctttaaacagagtatcataggtaaaggaaacatttaagtctcaaggggacagcaaactggtgttcgaatgacaaaaggcttcatactgtttaccttcatcctttccatagtataaaaatggacatttgtttactctgtagttttgtggtattttttttcccctaagggagaaaactgagagcgtctaaattttcgctgctgaagcatccaaacagctatgttcttccccatttggctatgtacatgtagaattctccctgagggcagtggtaagggctgtatatgtgtgtgtcataaagcctttgctcctaacgtgagagagctccagggctagctcatggtgagcgtgtcccagatccctctcctctgtgggcttcgccccgaggccactgtggctgcctactgtgcctcaagcctgctgagggaagtccacagcccctgcctccgcaggttatcagccgctcctccctgatgagagggcctgggaaccagggctgaggctgggctctgccctgctggacttgttatcctttcttttctctcttcattctctgctttcagaagcatcagatcccccctccaggactaaagcaataaggaacgtatttgcaagcatccccggttgcttctcttgctgactttggcacttgagtacatgcaacaaccaactctggacacaaaaatgctgccttccaggcttggttcctctcctgcagagcaaccctaacctcacagggctcttgtcttctgttttcttaatgagaaaatagtttagggattattggcgctgcaggtttactcttttcttgtgttttcactcttaatcatctgcagtctctatgatctcatgtcttcttgtttcagtatggctacatctaaccaacaactcaatagtgggggtgggggtgggggtggggggagatggctcagcaggcaatggctgctctcccagaggacctatgtttggatttccttcctaccttccctccttccctccctccctccttccctccctccttccttccatccctccttgcttccctccctccttccttccctccctccttccttccctccctcctttttccctcccttcttccttccctctctccttccttccctccttcctttcctctctccctccttccctccctccctcctaccctccctccctccttccttccctccctcctttttccctccctccttcctccccttcctccctccttccttccctctctccttccttccctccttccttccctctctccctccttccctccctccctcctaccctccctccctccttccttccctccctcctgttttccctccctccttccttccttccctccttccttccctccctccctccttccttccctccctccttccttccctccctccctccctccttcattcctccctcccttcttccttccctccctctttccttccatcccttcctatccatgaagcactttccacctcatttgtgtaggacttttttttttaagagttgttttcaaaagttaacaaaccttaaaagtagcatcagtgatgtggaaactgtcacatacctgcactctctgctgttagttcagcctatgaccgaatgacatattcagatatgaatttatcaaatcatgaatgaggtgggactgaggagaatggagcacatgtctgggaatggaggccacatggtgtcacctaaacttcacactggtgtcactctaggttaagaagtcctctctaagtccagcagtagtaataaagcaggctgggtggtggggtgctttgtgcacacagtatttcaggtcacatctctgtgtccttgaagggtgtgtcctgcctggcttctgtgaacaggttgtcatcagactgtttttcctaaatacccatcctgtcctttgttggtaataagaatttatagttaaagggcatggatctgtgattttagttaatacaaggagccagttccgtcatcagtgagatagagcctctgcctgtggaggacctagcatagtgctggtctggggcataagcatcactccaggccacgggaaccttttcccctgtctgaggctaaagggagaggagggacagagccacgttggccccttttgccagcatggtgctgactgaagaacccaggaatgttgcgcagtggatatagtgtacacatttgaaatttaacttcacacttacatggaatccattccaggataagaggcagtcgagaatgatgaagtttggggaagagactggccatcagcctggcttatggaaaggtgggatccaaattaggctgtgttcacaatcactaagctggaaggaggcaaataacaaagagacaggagtatggatgtgtgcacacacaaggacacgggaagagggaagcaaagcacttcttggcatggcgaccaggacttggtgctctcagctgcacacagctccacggtgtagacgagacacaccctccagggctcttcatctggcttgaatgtataagaggggatttgggggctgtttcagaattgcagtgaattgtggtggggaagacacagaggattagttcctggtgaccacagtagcctaggaaggaaagaagcagggacagggacgggtgccaccttcagagacccgcctccatcagcaggtgtcggccagccaggtcccacctcctaaaggctccacagctcccccaaataatgctaccagctacagaccaagtgttcaaaatatgagcggattggggatatttcagatgcaataagatgtacctattatatatttcagcattttttcctttggggtgtttcaaatataactatctcttttgtaaataaaaacctcaattgtggtgaggttattaaaagctccaaggaaccagtggcagaaatggtttggaattttaagtggcttctagtctagatattacattcatggttgtcttaattcaggtttctgttggtgtggtacaactctgtgaaaagagagtgttcaattgggtgtatggtttcagagggttagagtccatgatggtggaacaaaggcatggtggcaggaacagctgagagctcacatctgagtctgcagcagaaggcagggggtgggaggagaagaaagacagagagacagagacagaatgagaatatatatactgggcatagtgtgagtcctttgaaaccttgaagcccgcctccaacaagaccacacctcctaatccttcccaagtagttccaccaaccaggtccacgtgttcaaatataggaacctatgagaaccgtgcacattcaatcccacagcagtctggcatgtgtgtgtaagaactaaaatgtcttttgtttcctgtggagcgtactcttctgagaactgaaaagactcacttttagatagatctattttccttaagttctgtgctggctctttagcagtatatttacaaaatacctgaaagtaaaaggaggtaaataatttgttgatcttggtccttcttaccaccctcaacagttaaaacaaaaccaaacccagtttgtcatcctcctgtctttcccccagctaagcccaaagtcatatgactttccttgtgttctcatcgctctgccagctcatatgcttcaggaatttaatcacctgtattgctgcctatgattgaaaagcaatggcatgtactttttctgagggaatgtatttccatttttcctggacagccacccttttgttgatattttagcaaggcttgggaccttaattgattgtaaggcttcagcaagatcacttgttacgcccagtacagaaactgtgttcctgtgggttagtgaacaagtcttgtgaccatcggctggagatcctgcagagcgctctaaatgagaaaccagcaagcatgggtcatgataatgagttgttccatggctgcagatccaggaaggagcagacataaacagccttttccgtgcagacaagcagccagccagccaaggtgtttccttaagtgtggaggattgaaaaatggatggaacctggagtggatagtttaccacatgtaaaataatcaccatgtatgaatacagtatgtgaggagtaagaaacacattttggaaaagaacagtgattttacatgttgtcattgaggacagcatcttacttttagagtccatggtgttatctcagccagagttagccttgttccctgaagcagatcgctgccctgtccatccctcgcccacccacctcttttctattcttggctttgggtatacattgcacttcatagagaacacggtactcaacccagactttgtcctaacacaaggaaattctattacatcttaatccaggaagatggcccaagccaactgaatggtggaacaatataatatacctgaaaaattccaggcccagtcagtataacattctctggaaaatcttattaacagtacactcaactccttggcatgctggggaaggagagagggtgggcagccaggtcctagtaaagtcatggacataaggctgagagacagcagggattctggacgcagagaaacatgagctcaaatcctcatcctgctgcctgctaatctgtgtctctgtggccagtccttttctcaatatgagtttcttcaaaatggaactcagacttaccaggacttctgtaagaatccaatgaaagaattcatctaaaacacctggaagggaacctggcagaagtaggaatttcacaaatgaggctgtgatgactgtctgcactttctaggctttggcctttttgcctggtcagagggaacactgaagcagtagcctctgggtggggcatcttagtgcagaatactgcgtgtgcgttccgaaggtccgggttgaaggaatctagctgtcccatggacagagaccagcgtcccctgggggagtggttgataaggtctgtccagacttcagaaactcattttcaggtcaatgaacaacttatttagacactgtagtaaggaaaaggtttttctgtaagagagacagaagggaaaattgtagactctatgagtgcttgtggtactcagagctgaacctctgtgctgaagtcctcagactcggcagctatgcatggcttgaacagacagaagccctgattaccagcattacattaaaatactacagaggttcttaaaactattcaatacttgctttctggctttaatccttcctcagaacgttaagtcatagttgtccatttctcacatggaaaaaaaaaagtggccttgggagatggcaccatccacctgaaatcaaccccctcacattctctgcagacacagaacacacccatcctcacgacattccatttcccattgtcttttgagtatcaagaaacccagtgttattgggactccaaagccagatgtggttgtcactaactattccaggtggcacagtgccacttgattcaaaacaattgcatccagcagtcccaggctttcgtttgtagctctgagtatcttggaggcaccaatatggcaggtgcctccaggtgtcactgggttccttaagttcctctcttgctgcagctgcttccccctgggcatccaagacctgtccctggatctacgtgtcctctgacactggaggacttacatgcaccacctagatgtgcagggagccagtctccacggggccagccttactcattggcaactagccggttcatgcttctctcagtgagagttctgaaagctgctcagtggactcagggtcatggtaagactgtcatcagtcatctgtgacagtggccaactaggatgacatcacatccgtgtgctgcgtcttccttttcccctgtttgtccccagctgctcactcctactctctgggatcacttccaaaataaactacctgcctgcacactttcagctgaagcaaaactagcacccaaaagcatttacccataaccacgtttacactaacttccttcatcgtcaccaatctggggagcttaagaagttaacagcttagttttatagatgaagaaattgagccccagaaaggttaagttattccccaggttcatacaacttgctggagatagatgtgcgaacagaattcctctggtattttggctgcttgtcttctgaacatgctaaccattccatcacttccttggtcacatgctggctgtgaagctgggctgtcagtacacagagaatcagtgatgacaaaatttgtcctaagaagtgcgaatgctatgtgctttctgcatacgtcagtacgcatggaaaacagaattgacggaggctgttgctctgcagaatgagaggacagagcaaggtgatacccagacgatgcagtggtggtcggctagggaatgtgcgctgggaagaaactaggatttggtgagggtcattaaagcatagtggacagatggtgtgattgaagggctgactaagatgatgtcctggaccattactgtctaataggaatgcaatgtagatcattaacgtgagccacagatgcaatcttacataccaaagttaaaaaaccagagagccaggtgaaattaaatttagcaatatattttttatccagtatatcaaaaaaaatcaccactccaacatgaattcagcatcaatagctatcaaggagaattttgccttttttttttaaaaataaaacccatgcattttatacagacaacacatttcagtttaaattcactacatttcgagtactcaatagccacacacaatggccagtattttgttcaattcagttctgcaggaagtgagctggaaggctggtcagtggtcatcagaaaatgttgctagaaacagtttgggggtgggggagtgtttaaaacttaattggtatggattgttatggcagagtggaagatgagctcacccaaggagaagccaagctttttgaagggtcatctttggacagatgagatgtgttgataatgaaatgtagaattgtgagggctggcaggatggattggcacatcaaggtactgccaccaaacttgatgaccagagttcaactcctgaaacagtatatactgtggtatgtgcacacacattcacacagattgtatgtgcatgtgtgcctactcacacacataactaatggtttttttccatttaaacatttttatatatgtttatatcttttttcttcatttttttaattggatattttctttatttacatttcaaatgttatccccattcctggtttcccctctgaaaactccctcccccatttcctctctccctccccctgctcaccaacccacccactcctgcttcctggccctggtattcccctacattggggcatctatagagccttcacaggaccaaggacctctcctcccactgatgtccgactaggccatcctctgctacttatgcagctggagccatgagtcccaccatgtgtactctttggttggtggtttagtccctgggagctctgggggtactggtgggttcatattgttgttcttcctatggggctgcaaaccccttcagctccttaggtcctttctctagctcctccattgggtaccctaagctcagtccaatggttggctgtgagcatccacttctgtatttgccaggcactggcaaaacctctcaggggacagctatatcaggctcctgtcagcaagcaagcatttgttggcatccacagtagtgtctgggtttggtgattgtatatggggtagatccccagatggagcaggctctggatggtcatttcttcagtctctactccacactttgtctttataactccttccatgggtattttgttcccccttttaagaaggaccaaagtatccacactttggtcttccttcttgagtctcatgtggtctgtgaattgtatcttgggtattccgagcttctgggctaatatccacttattagtgagtgcatttcatgtgtgttcttttgtgattggtttacctcactcgggatgatattttccagctccatctatttgcctaagaatttcataaattcattctttttaatagctgactccattgtgtaaatataccacattttctgtatccattcctctgttgagggacatctgggctctttccagcttctggctattataaataaggctgctatgaacatagtggagcatgtgtccttactacatgttggaacatcttctgggtatatgcccaggagtggtattgctgggtcctcaggtagtcctgtgtccaattttctgagcaaccaccaaactgatttccagagtggttgtgccagcttgcaatcccaccagcacagaggggtgttcctctttctccacatcctcgccagcatctgctgtcacctgaggttttgatcttagccattctgactggtgggaggtagaatctcaggactgttttgattttcatttccctgatgactattgatgttaaacttttttttttttttaggtgcttctcagccattcagtattcctcagttgagaattctttgtttagctctgtaccccatttttaatagggttatttgtttctctggagtctaacttcttgagttctttgtatatattggatattagccctctattggatttaggattgctaaagatcttctcccaatctgttggttgctgttttgtcttatcgacagtgccctttgcctttacagaagctttacaatttcatgaggtcccatttgttgattcttgatcttacacacaagacattggtattctgttcaggaattattcctctgtgcccatatgttcgaggctcttccccactttctcctctttaagtttcagtgtctatgattttatgtggagctccttgatccacttggacttgagcttaagaatggatgaattagcattcttctacatgttaaccgccagttgagccagcaccatttgttgaaaatgctgtctttttttccactgcaagcagactttgtggtcaccttgttgaaaaacaaaaaaaaaaaccttgatttttgggctcctacagatacatagaactcttttaaacgtaagggaactctccataccttccactaattagcagatacgcattgcatctatgcaaccaccccgcagatgacacaatccagtttgacatctgcagagcactggggctgtatgttagctgtggcagtccctccatgtctgggacccatcaatacattgcaaaccactgacattgggactggacaggcatctagtgggataagggctgtgaggtcctacagcttgacctatcagggatgtcacaggctaccggcacatagtgggtggtgatggtgtcatattgacctgctatataagattgcagtaggcatccctgcgagggtatttgagctctccctgcctccccccttctctttctcccagactaaagcacagggtttgttgcttatgtcccagatcggttctaccccaactgaaggagatctcatacctatggaggatcctgaagcttgtttgactcggctctttctctactgaagccaaacgtctcctattggtgctctcatgtagcagagaaagagtaattagcagaaccatcaacaggggactgaagcgcagaaactgcttaggtgcttcacacttctgtgaaaacccaattagcactcttttacggttgtaatttttaattactgtttaagttgagaaaaatgtattcgctaattagataattactgggtagtgaccttttgatttaaaaaaattgcttcgagtctgaaattgtctcaagaagaattgtttaatttaataaatcactgctgctttgatgtcatagaaaatctaacactgagaaaggtctcaaatctgctaaatttccagagacccagactcccaaccacatggaattccagcttcaggtgatccagtgccctcctctggcctctgagggaacctgcacacatgtgcctcatggttttgtttggttcttttcctcccccctccctccttcccacctcccttcttccccctctcaaacacacacatttcttcataaaaggaaaggctgtgaggagcttgcttataattccagcactcagggggttgaagtgggaggattgggtctaccaggccagcctttgttaagaggaagtctgtttcaaaaataaggtgtgtgtttgtagggagtggggcttgtggggaagaacagaaaaggatagaagaaaaggaaggaaggaaggaaggaagggagggagggagggagggagggagggagggaggaaggaaggaaggaaggaaggaaggaaggaaggaaggaggaaggaaggaaggaaggagcggggatgtaagtctatcagtacagtgtttgattagcatgcatgaggcccttggtttgatccccaacattgcatgaactagatatggcagccaattcccgcaaataggtaaagagagaagggtcagaaattcaaggtcatccttggattcatagtgtgtttgagggtagtctgggctacataagatagggtctccaaagagaaaaaaaattaaaattaaaagaaaagaaagattttctcccctgaggtgatgattggtatctgatcctataatttgatgagtatgagtgacagcctactcaggctgcttcttgttctttgctgtagtcgtgtagtttttaggatatgacaaatgatataactttatagggaaactcctggcttgtgatttctttcgtgtgtaaatatttatatatgtgaatatgcatgtgtgtgaatatttatatatgtgaatatgcatgtgtgtgtgttcatgtgtgtaatgaagttaagtctttcctctttaaaaaaaaaacaaaaacaaaacccaacaactacaggactgattactgtgtggtattagttacatatagaatgcttagttgcgatatggaagatattacttctatttcttaatccagtttctacatttgagctgagctttgagttaattctattcagggttaagggactgtgtcttgttgctgccggcagcatgaggaagtatgggaagagtttgagttgtatcttttggcttgtttccagatactttgatttaagatgatccagttttgactttccttatcttgatggtttaatatgccacctgtatatacaactgcagccacagcaaggacttctggggtgtgtcctagcacataaataagcaaattccagtgagattaagcaagtgtgtgggatagataccaaagagaaggatgatgaccacagcctgacccacagtgtccctgtgccttctttcgaagggccatttagcttgagttagaggtaggttatggggcttttgttttttgttttgttttgttttgttgttgtttttttgtttttacaacagaaaacaattagaaatatagttaatacagtttccaagttaaaagaaacttgggtatgatatatgtactatctgatgccaccaacttgagccccttcctgtctggaactctctgcacgctgaccttgctgagactgagtgcttattgtatgtgtcccctccctccctgttctgcaagtctaacccacactgctgtgttaggttttgtcccacacccagcacaggaggtgctcttcatgattcatggtctccttcccttgtttaacaccaatttctttcagcagaattatgctcactgggaagagggaccttgcctgtctcggtcaccaccaagacattgtttaatgacagagctctgaaaacatggtttttgtcattctcttaaacaaaaagaaggaacaaaaaggtactcactcatttctcctttagttgtaaattaataccaatgaataatgaatgctttcagatttttagatcaccagattagactctttaataaaccacatttattttgttactttatgtatatgagtgttttgtctgcatacatatatatgtattacgaatgtgattggtgccctggaggttagaagatgccattgaatcccctcggaatgaagttatagatggttgtgagctgcagtgtgggtgctgggaattgaatctgtgtcttctgcaaaagtaactgctcttaattgctgagccagctctctagacccaactcagtcgttttagctataatgtccactgttaaaagaaatccttactgtctcttaattaacttcatttaaaaactatctcattaatctcaccagattactcatattcctgatttaaaaaccaacccatgattgaagaagaaaggtaaaaactattgaaaggataaagaggaaaatataaattatgaactgtgttattcttgagaagaacatttaaactcatgtgagaaagatttaacaaaatagaaaaaggcccagtgatgtggtaagatgggtcatcctgccaagccaggtctccaagtttatttgtaaaaataaactcacatgaagttctcatttgtgtttgatcatagtataggagaagcttgagaaccaaatgagtaatagcttgcattgtccaacaggacagaaagcactgagtccacctagatgtctacgtttgttagtgactcacccgtactctgaaacttgctgcaaattaaatgcattctatgtgtgcagtgagaggcctccaagcctgagtgcctgagccccatccccaggacccacatggtcgttgtctcttacccttcacgagcatgctgtggcacacacatttgcctcaccagcaatggaataaatcagtacacataagcattgtttaaaagtccaaaatctcattcaaacaaacatcattcccattgtaccctgtggctagcttggaaaagtgttggggacggtgacatcactctggctggccggggtgctcttctctaagtccttaccttctatagctgatcaggcttttagtctctctctctccctctctctccctctctctccctctctccctctccccctccccctccccttctctatcccctccccctcctcccctctctctctgtgtctgtctgtctgtctttctgtctatgtaattataatagtgcatttcttcttttttaattaaaaactatattatgtgcatggctgtttgcctgagtgtatgtacatacatcatgtgtgttctggtgctcaaggagtctagaagaagctatcagatcccctggcactggagtttgtaaggtaccatgtaggtgctgggaatccagctcaagtcctctgtgagaacagcaagcactcttaactaccaaggtagctctcctacccctgctcatctctttaattcctgaggttatttctttttatttctttttttaaagatatatactgtagctgtcttcagacactccagaagagggcgccagatctcgttagggatgattgttgaaccattatgtggtttctgggatttgaattcaggacctttggaagagcagtcagtgctcttaactgctcagccatctctccagcccccctgaggttatttcttcagcaatctgccttaaaaataatttcagagggttgggaaatggccctgtggatgaagaacttgctctttaagtgtgagaactaagtttggattctagcatgctactatggcctttctgtcatcccagtgctcagaggcagagacaaaaagatctctggagcaaactggcaatctaggttagccaattctgtgggttctagactcagtgagagacccccacctcagtaaataaagtagggagtgattgaggaagacacccaatgtcaacctgtggacaggcacatacacatgtatgcacacaaatgcacccaaacacagacacatgtgtacactcacagcatgcacatgtacacatgcaaaagtcatttctaattgcatgtttgttttctggccagaaaatagaaatagacagtattgttacgaatccatcgcaagaggacaaggttcggtgccttagccaagtggctcaaggtctcccagatgtctctactccgtcctcactagctacggcattgtgttgtccagctgcagggactctcaccttttccctactttagtctgtgttgtactattttacccacctgctgtgctggtaaacctgaaaccattgcagcaaaaaccgcttatttgatcttccctaaaatattctgtctctttttacctcctgtagataaagccaacaggtccttttcctgctagccaagacctgtaatgagagccaggtggaagatacagctttccagtgtagttttcatgctcactgagtctcacgtagtctgcaagaaactatgggcctcccccttggctccatggctgcacttttctcctggtcagcccctgtcagagtgatgtggtgataacgtcaccacagggccacagacagcctgctggaaagggagcaggagtgtgggcctctaaggctgccagaatcccattcacatccaccttgctgttttctccttcacagtcacaatctctgggtaccacggtcattcaggcaccgcttacttgaaccagataggctgtagatagagaagacctggtgacgttggagaggtggtttcaggattaatagaaactacaatgattccttgagttcttaaaatagatttcaaatgaaacatctggggtctctaaaatgataattgaccttattgctgtgtgctgagatttctgttttagaactccccaaatatcttttttttttccattttacagtgactgtaattacagctaaatattatgatagagatttggttgagcttcaggaaccacagtttaattgtggctttgctgctaacagctgtatagcttctcttatgccatttaactggaccttatctttgtgttgatctctttgataatttttgtgattctgtggtccagtgttaagagttcaaagctctgtgctctccaacccaaagctgtctatccataaaacaccatttcctcttctctgcagagcagagctctgtccaggcaagattactctttaaaatcccttggaaaacccctcccaagagtctgactgcccacatgattctgcagtgtagccagaatgaaaattgaagtggtagtgtgttaatctgttctaagctacccagtgggcacacgcacactcctcactatttgcccaaatgttttggattcagagtgaaagacacacacatgcagccttatttttaatatgccctaagcagcccaacagctgggccattccctgactcataagttgctaatgcctcccctctgatactcctgaattattacttactgaaagttatgtttcacctctgctaccccagacccagctggaggagtgagccctgagcctactcttccctgattctctgtcttctgcagctcccatgctggcatcctgttcctttcctggcatggcggttctcccctccctcgagttccttgcccaggaacctcaaagtcctgcctcagtctccctgcacagcctttggccatcagcaactttatttatcaattagaactagctgagggcagggactgtcagtgtctcacatgcagacaagtgaatcctcttgtaatttgggaacccaattaacataatataagcaataaaccaaatccataacatctcatcctttccatccattaaaaagccttttctctcagatatacattgaatgtagttaacagttgcgtaaactataaggtatgatatacactaatcatgtccagtccatcaattttgtcaatttaggttcattactctaacatctaccctaacttaaagagtttacaattctgtacctgaattatgttttgatttcaactacattaccatatgaaaaccatcctttcaaatctacatcatcttccttaagtgctagacaacttaagtttgattatgagattataactagtcttcaaccccatcagagatccaagaacgaattaaatattgcctgaatctataggaaacacaaaaacatagctaccaaaacttcaccaatttgcagaaacagctgactacctggacagttccccattcctcaaaacgtttgtcttcagccttctgacccagaatcacctgacagaacttaagtgaagcaggaactatgaaggactagctaacgctgtattggcagagcaaagctgtcgactatcttggacaatatttttggggggtggggtggggtctgtaggtgaattagggtaattctttcccagtggctacttgccacaactggaacaactccatatggaggttatgatgctcaatatcttctttgaactgttgggaactgacatgcctcttagtcaaaattctgataataatgaaatgattataaatgccatattctgtggagttctgatgtttttgaagactctctatataaagtatatctgaactgttaaatcttgactactcttagctatttctatttgaatactattaaaaacactttattataattaaatcagaatctaatataaccataagcttactatctagcccttaacttgtcatccttaatcatcccaaacagtttgtaatagcagctatagaaggccttatattcttaaatgagttgcatgggcacaactgctaatgcctagctaagagtaacaatattaatttcaaaatttgtatcaatacataaagatttataccaatgaaaactttaaatctgtatcaatatataaattctgtaccaatgtaagaaattatagcttcaattttgcatctattataatgatttctatcagtgtaagattatagatatacagtgctttactcaagaataagtttagtaatccatcccatctgttttctccctgttcaaaattatgatcacttccaaattatcccttagtgacaacctacctataatttataaaataaccataaccagaccccaaaaccaaggggtcgggatgatgactttcacaacttctccctgctgaataggggcgatgaaaaacattttaaaggactgtggagggatatgaaaattagaaaaattggttagaggccaagcgttggtggcacacgcctttaatcccagcactcgggaggcagaggcagaggcaggcaaatttcccagcctggtctacagagtgagttccaggacagccagggctacacagagaaaccctgtctcgaaaaacaaaaacaaaaacaaattggttagacttaagaaagctagctttatcatcggttattcagtctctgtgtgcttagaaggcttaggacttgactgaagttctgactggctctgtctgaaaggctggatgagctgagtccatcaggaatcagcagctgttcctgacactgtgttgggaggcaggtagctggagcagcaggtcacctcagcatccctgtagatgagtgttgtcagagctgtacattctgtaatatatgaatcttacaaccaaatttttagaactattaagatatttgtatggattgtgcaagttgcacagatcagttaaggatgagattttgctcctagtttgagtaggtaaaaggcaactctccttttatgagttaatttgatcaataaccaattgtaataaatcttcaatcatgccatgtgaaggatggcatgatgaagggttccacaaccaacaagatttattgtctaagtttagctgtttttcgctagagacatttttatgtctcagccatttacagggctgttcccttgtgtaggactcagcaaatcaagttacctgtcctgtttgatttttttcaatttttttttcttttctgtagccaaggtcttcatggggccttcccctgatccatgaactctggaaggagttcaaagtcttttcttttttcctattaatacaagtacagagcccctctttcacaatagtaggtccttggtctagtagcctgaaatcatcaaaggtatagattgattgaaattggcagtctccttcagtcctgacctattttgacctttctcccagaggactaaatcataactaccaaacttataaccacatgcattttgataattaaaacaattcaaagcaatcaaagcaatctaaacaaaaattattatccattgaaacagtgctcccccactatctcttgccttgttcttacacgattaatttttaatagtaaggtcaaagcctaaattcattactatatctatgtatacttaaattatcccttctctgtgggtatgtatgttccttttctctttatattacttgaattagtatccttttctatgtatttatctttaattaaatttccttctatatgtctgtgtcttagtcagggtttctattcctggacaagacatcatgaccaagaagcaaattggaaaggaaagggtttattcagcttatacctgcaaacttctgttcatcactaaaggaagtcaggactggaactcaagcaggtcaggaagcagcagctgatgcagaggccatggagggatgtttcttactggcttgcttcccctgattgcttagcttgctttcttataaaacccaagactaccagcccagagatggtaccacccaacaagggactctcccggcttgatcactaactgagaaaatgccttacagctggatctcatggaggcacttcctcaactgaagctcctttctctgtgataactccagctgtgtcaagttgacacaaaactagccagtacagtctgtatgagcctattttagtagtaatttgtcataccaggctaaacaatcccagaaatcttgtgtagaccatgttcgaaagatcccgagtactgccctggcatagacttcttcacctctctctctctctctctctctctctctctctctctctctctctgttttttgagacagggtttctttgtatagccctggctgtcctggaactcactctgtagaccagtctggcctcgaactcagaaatccacctgcctctgcctcccaagtgctgggattaaaggcgtgcaccaccagcttcttcacatttcttttaatgaatttttttctcattcattctattctctttatcttcatgtctttgtttcctacatttagatcaaaggtgtgaatttctttattctgtgtatacataaaaacacttaaacaattaccataatactcctttctattcttaaaaacaattaatcagatgtcattcatctctgtcttttgttcatctgagcagtggggcaaccagcctctattgcctgtctctctctgccttctgagtagcctttctgtttgcaaagcaggggttcccagcacctctgagttcaaactctcggaggctgttaaaagcctttgagaggggcccgggataaatcccggacacccagctttgtctgggtcgacttggggaacttaactgtgtctaaggtttcttagaaccttagaattatgcgtgccttttgttcgagttccaaacctgtgccgcttagggagggaccacatgtgtggctgagctctgctcagctgagaaaccaattctcccgtctcctaatcttgggtcacagcttgtgtcttccatttcataatctctgattaatttttaaacgtgagtacaaacctgacacattgaacaacatctgaagtagtatggcagtcagctctaaactccccagtgggtgcactgggtccttcctacacacccaaatgttttggattcagagtgaaagacacacacatgcagccttatttgtaatatgccctaagcagctcaacagctgggccactccctaactcctgcgttgctaacgcctcccctcccatattcctgagtataattcatattacttactgaaagttatgtttcacctctgctaccccagacccagctggaggagtgagccctgagcctgctcttccctgattctcacctggctgtcctctgtcttctgcagctcccatgcttgcatcctgttcctttcctggcatggtggttctcccctccctccagttccttacccaggaacctcagagtcctgcctcagtctccctgcacagccattggccaccagcaactttatttatcaattagaaccagctggaggcagggactgtccatgcagacaagggaatgctcttgtaatttgggaacccaattaacataatataagcggtaaaccatatccacagcatgtcccctgagggtctagatcctagggacacactgctgtcgtacctcccctatgccttaccctttcattctgaagtcaggatcatttcattctttaggagatggtgtgtgtgtgtgtgtgtgtgtgtgtgtgtgtgtgtgtgtgtttgtgtgtgtgtgtggtgtgtgtttgagagagagacagagaaagagacagagacagacagacagagagagatggggagagagagagagagacagacagacaactgtttagactgtctctgaacttgatatcctcctatcccagcctcttgagattgcaggtgtacattcccacacagtgagggcatagctacttttataactttatagccataagagttaaagggcagctgtttcttcttggcatgctgtttctgaatagtcttcattgactcagtgcccccctgtttcagccatgcttggccatcaactcagaaaagcagtaagaaaggtgcagagagcgtaagtactaagtgcccagtattggctttgagctctctgaagtgattcttcaaggaagctcccaggagcggcaacaggaatacctcatgaagcttgtgagaaactctgaccctgaccctcagtttcttccctgaaccagaggcccttaaagtggcaccgatactcccagagccttctaggtaattctccatgctactgttggaacatttttctagaaaaatttaggttttcagacagttgggttttatttctcattttaatgtgatgacattgtttttgaaataatcattggactgctgtggttaggagggatttcccctcccccctttatctccccgtgtctgtctctatagtctctccctcccaccctgtctctctctatctctctctttcctgtagtccaggctggcctcaaactcattatgtagtctaggatgccttttaacatatgatcctcctgcctccatgtctcaagaactcagattacaggcttgttccgtcaagcctagctggacattacacatgtttaaaatatgcattttagttatgtgtatatgtgtatcctagttaggattcttattgctgcggtaaagcacaatgtccaaaagcaaattgacttccacatcactgttcatcatcaaaggaagtccggacaggaactcgaacagcgcaagaacttggggcaggagcttatacagaggacgcggaagggtgttgcttactggcttgcttctcatggcttgctcaatccgctttcttatagaccccaggactcccagccaggagatggcaccacccacaatgcactgcctctccctaccctcatcagtcactgagaaaagccttacagttggatcttagggaggcattttcaaaattgaggttccctcccttcagatgactctggcttgtgtaagttgatataagggagccagcacagtgtatgtctttgtgtttgtgtttctgtacatgagtccagtgtctgcggtgcaggaaaaagatggcgactcccctagagttaggattacagactgttgtgagctgcccagtgtgcagagaattgagtgtggatcctgcagaagagcatcacgtgctcttacacgctgagtcatctctccagccctggatgttatagtttttttttttaaagaaatattttccagcctattcttttgcttgccagaagttttcacattgttttctgtgtttcaaaagcttctttctacagtgaacatttaggcttagcttgtattgccatggagttatgagtacctgttagttcagggatgtactgtgatgtacagacatgagctaaaatggagagatggtcactgataaaacccttgtttcttttcttcttccgagctggtttattttctattaaacctcccagatgctgttttgttactttagaataggaaatctatattatctttttaaaaatccctcttaaacaagtggggttttcccaaaaatttctctagccagagggaactcttcattaaacagagcactttctggaaggagagcgtatgagcttatgtcaggaattaagtgatggagaaggggaaaatgtcgcctggccttaggtgcagaaactgacccagaagccttggccaagtggcgagagttgacagagagccaatcgtggtgcttctgacccgtgccttggcaggaacctctctgctacctttagacttcagagcatctctaactggttggatctttgtcaagagcttggtccgaggtggtttcttttcttttctttttatttcttttctcttgatttaatataaagcactcacaaattctttcaagaacaacacacagctttgtttagctccctcaagccctttcacctctgtcaagttgcaccaggaaatttaaggtctagccagaggcccccaaagagttaaaaaaaaaaaaaaccaaaaccctcaaccatcctgcagagtaggagaaattgatgtcaaaaacagatgtgctgctgtgggccttgctgaattcataagtcaggataaagccagtatgtatgcatgcatcttaaaaaaaaaaatcttggccagaattatagagaaatggaaggtctcctctgcgattcctcttcaggccttgctggccaggagccctggtgaagggctcccgggagacaggtggccctgacaactcctaaccattaagtcagaacgccctctaatcccttgttttccttgttggtgttctgcagggccgagctccctgcacagagcctgcccgttttcattggctttggggattgttattggagtggctgacagctgtctgccaggctgtctgaaactgccttcctgtgctctccacactgctccacttcacagcgctattgttcctgtccagccttttcttaaaatctttcccagctgtatcctgatatggcaaaccacctaaattagctccagattgttctgtttattttatgttagataagtgatagactatagtcccagcagcgggccaaatggagggtggaaatgggggcagggtgttggagggggtcagaagacgctcgattttttactgcacagggagagttccagacaaaactctgaaatggcgcatgcgtgacagagccactagtcctgccattcatacgtgacccagagtggttggcaagcataaactttggatctgaacagcagaaaagagaaatcagaaccccaacacaaagccttactagacagaagcaaaaatatctatcctggggaaaacacataggatctgtcaggttggtttctatgccagctaccacacttgactttcctgtcaacagagacccctctcacttgccagtgaaaggctctgtgggttcaaacctgtccccagtcctttaatctccctgtatgctcggcatttgaaaacatttgcttcctgtgcctgaatttaaagctagaaacccacagcaattgactcgccatcataactgctttccatacagctgcaagtgaaaattcacaatagatttggcctcttctgctcctcttggccatctgtgcaactgcttaactgtggcctctcccctgtggggccaacttctagcagggcctctccacagagaccttccaaatgcttaacaaaaaagtgttttttaactataactagattctctcccaggatgaagacttcatatctgtagggttaaacccagatataatataactagattctctcctaggatgaagactttatgatctgttgggcaaacccagatacaatataagaaatgaacgtccaaagcttgactcagctgaagcaacgctagcagccactgagtgcttgtctctggtaactcaagactccctagtgaagatagccatgactcacttcagagctgggccactcctccccatgctgagccaaagtccttgaaaccctttctgccatgtgcaaagacagggaggagagcagggtcaggagtaataaaaaaaaaaaaatgcccctaggaactgcctctcactttccttttaggaaaataatctcactgtataatttttttaaatgacaaaaccaactggagaaaaataattaccttgtcaaggtctcttggccccagtggatatgcctttggtctctatgaaggtccagtatggagctgcctggcctgcatgttaccccagctctcagcgctggatctttctatgtagccttgttggcttttgattgtgtacagccatgcatttgtccctgggccaggcttctcctagttgtgttcatggaaaggagactgaacctgtctccccttgccacaacactaacagcctaggaggcctttaatcagggcctagcaaaccaattttttttctttaattcttaccttataccatgcacctcattacacttttgttttcattcattcctagactttaaaaacagaggcaaacagctcatgtgcccttggcctgttctcattcaaaccatggtacagctatctccagctagctaagatggagtaaacaagtcaaggcttcctcactgtggcagataaaaatgagaagcagaaagcagactgtctgagacttcatagggcaaatggtaaatgagtggactctgggttttattaattcttgtgacggggtaagctctgtgtgtttgttttctctcctctgtctttcaggtctgacacatgaaacatgaagtaggcactgatagtattcttttgaagaaatccctacttctaatagtgagtgaagaaatcaataatctgaaaaacatgaggaactcacctcacatttctcttctccagtattctctgctctgtgttctatgccctgtgctctgtgttctgtgttctctgttctgtgctctgcactctgtgttctgtgctgtgtactgtgtgctctgtttgctctgtgttctgtgctctgtgttctgtgttctgtgctgtgtgctctgtgttctgtgctttgtgctctgtgctctgtgttctgtgttctgtgctgtgtgctctgtgttctgtgctgtgtgctctgtttgctctgtgttgtgtgctctgtgttctgtgttctgtgctctgtgttctgtgctgtgtgctctgtgttctgtgctgtgtgctctgtgttctgtgctgtgtgttctgtgttctgtgctctgtgttctgtgctgtgtgctctgtgctctttgctctgtgctctgtgttctgtgctgtgtgctctgtggtctgtgtgctctgtttgctctgtgttctgtgctctgtgttctgtgctgtgtgctctgtgttctgtgctgtgtgcttgtgttctgtgctctgtgttctgtgctgtgtgctctgtgttctgtgttctatttgctctgtgctctgttctgtgctgtttgctccgtgctttgtgttctgtgctgtgtgctctgtgccctttgctctgtgctctgtgttctgtgctgtgtgctctgtgctctgtgtgctctgtttgctctgtgttctgtgctctgtgttctgtgctgtgtgttctgtgctgtgtgtttgtgttctgtgctgtgtgctctgtgttctgtgctgtgtactgtgtgctctgtttgctctgtgttctgtgctctgtgttcggtgcggtgctcggtgttcggtgttctgtgcggggggctcggtgttctgtgcggggggcttgtgttctgtgctgtgtgctcggtgttctgtgcggtgtacggtgtgctctgtttgctcggtgttctgtgcggtgttcggtgttcggtgttctgtgcggtgttcggtgttcggtgttcggtgcggtgtacggtgtgctctgtttgctcggtgttctgtgcggtgttcggtgttctgtgcggtgtactgtgtgcaatgtttgctctgtgttctgtggtctgtgttctgtgctgtgctttgtgttctgtgctgtgtgctctgtgttctgtgctgtgtgctctgtgttctgtgctgtgtgctctgtgttctgtgctgtgtactgtgtgctctgtttgctctgtgttctgtgctctgtgttctgttctgtgctctgtgttctgtgttctgtgctgtgtgctctgtgttctgtgctgtgtgctctgtaatctgtgttcagtttgctccatgctctgtgttctgtgttctgtgttctgtgctctgtgttctgtgctgtgtgctctgtgttctgctttgtgttctgtgctgtgtgctctgtgctctgtgttctgtgctctgtgttctgtgctgtgtgctctgtgttctgtgtgctctgtttgctctgtgttctgtgctctgtgttctgtgctgtgtgctctgtgctctttgctctgtgctctgtgttctgtgttctgtgctgtgtgctctgtgttccgtgtgctctgtttgctctgtgttctgtgctctgtgttctgtgctgtgtgctctgtgttctgtgctgtgtgcttgtgttctgtgctgtgtgctctgtgttctgtgctgtgtactgtgtgctctgtttgctctgtgttctgtgctctgtgctctgtgttctgtgctgtgttctgtgttctgtgctgtgtactgtgtgctatgtttgctctgtgttctgtgctctgtgctctgtgttctgtgctgtgtgctctgtgtcctgtgctgtgtgctctgtgttctgtgctgtgtactgtgtgctctgtttgctctgtgttctgtgctctgtgctctgtgttctgtgctgtgttctgtgttctgtgctgtgtactgtgtgctatgtttgctctgtgttctgtgctctgtgctctgtgttctgtgctgtgtgctctgtgttctgtgctgtgtgctctgtgttctgtgctgtgtactgtgtgctctgtttgctctgtgttctgtgccctgtgctctgtgttctgtgctgtgctctgtgttctgtgttctgtgttctgtgctgtttgttctgtgctgtgtgctctgtgttctgtgctgtgtgctctgtgatctgtgttcagtttgctctgtgctctgtgttctgtggtctgtgttctgtgctgtaggctcggtgttctgtgttctgtgctgtttgttctgtgctgtgtgctctgtgttctgtgctgtgtgctctgtgttctgtgtgctgtgtgctttgtttgctctgtgttctatgctgtgtgctctgtttgctctgtgttccatgctctgtgttctgtgctctgagttctgtgctctgtgccatctgctctgttctcttctttgtcccgagaacctgaggcttgtaccctgtctctaactggctgagcgcctgcacaaaaaacaaactcattcctttagagggttctaggaaaacacagtattcaaagtattcaggatataattcagaaatacttatgtcacaaagagcttttctcagagcaaaaaaaaaaaaaaaaaaaaaaaaaaaaaaaaaaaaaaaaaatccacacatagatggccatctttgagatggtttaaatactagaattcaaagataagcatttttttgttttaattttttaatttaattcacacatgcatgctttgtgtactaatcacactcatctcctacctccctacccactcctgtctacatctacccctatccttccccacagttctctctcacgcattcacacctgtctgttttgttttgtgacctaccaagactaaccagagccatgtgtgagagctctgcctgtgggttcagcagagagtagacaactaaagacagtggctcccccttctcacagaatccattaatagccaatagttcagagggaaagggtggagccctgtgagcccctccccttccttcactgagtataggtagggctagtcttgtgtgggctcagcacagtaaatacagttggtgtgagtagatggttacagtagttgtacctagtctagggcatggcattcacatccctctccatcttcttctggatagtacatacttcctgcctcctcttccacaatgttcctagagccttagaggtggtggtagaagtggcttgtttaaagttgggtcggtatccaacacttattctctgcatcttgggcagcgctgagtctctgaactcaccactgttgggtgtagggagaggcctctccaagtcaggctgaagctttctgtgggacagtttatggaagcccttctccatgagatgtcagcaacacagttgaatgagagttgttaagttctcagtagagaaatggagctacaacctaacaaacaagcaaattaaatcaacaagtggggcctaactggaaactgcactattgaaatctagaatatattttcatggcccgaaggaggatgacagtggaaaacaatcagtgaaggttgggatgagtccacgggattatacagctttaagtgagggttaagaaggaccgcagggaactgagtcgaaaggatggaccatctagagactgccatacccggggatccatcccataatcagcctccaaacgctgacaccattgcatacaccagcaagattttgctgaaaggaccctgatatagctgtttcttgtgaggctatgccggggcctggcaaacacagaagtggatgctcacagtcagctattggatggaacacaaggcccccaatggaggagctagagaaagtacccaaggagctaaaggggtctgcaaccctataggtggaacaacaatatgaactaaccagtatccccggagctcatgtctctagctgcatatgtatcagaagatggcctagtcggccatcattgggaagagaggcccatcggtcttgcaaactttatatgcctcaatacaggggaacgccagggccaagaagtgggagtgggtgggtagaggagtgggggggggggtatgggggacttttgggataacatttaaaatgtaaatgaagaaaatacctaattaaaaataaataaataaacaaataaaaaagaaggaccgcagggcattggctttccaagagtaaagacatactgatgcagaaaatgttatgaagcagaaatgtttgaaaatactgcgattttagtaaaaggtccatgaatagattaaagaaagtcggagataaacctactcaacaaactataagaaaacaatggccaaatcataaactgctgaaaaccaatgaggaaaaaaaaatgtcttaaagatagcaatcatattaaaaaaaaaaaaaaaaaaaaaaagtaagcccggagttttccattgtgtagctgctcatttggagctgcacagcatcttgaaagcctggatttggtccccagcaccactccagcagctgtgatggtgccctcccacagtgccaggacttgggtggaggaggagggcccggcgggtcatcctccactacatactttggggtcaaactaagaaacatgaaaccttgtttcaaaagatttttttttttaatttaaaatttacactttgtgcttgtagcattttcattcagtgcttagagttgagcccaaggcctcagacatacctggtaaatgccctaccactgagctatatgctaagtccaacttcattgataacagataaagaactataactaactaggggcttcccacagtgtataaggaatgtgtaccatacacaccagtgtggagggattcctaacacattgtgcagaggaaagaaagccagaccaagattatactttgtgcttttaaatttttatttatttatttatttatttatttatttatttattggcagtttattatattattatagtgctatgaagtacaaaaccaaaaaattgtttgtttatttattgtttttcttttttaaaaaagatttatttatcatattatgtgagtacactgtcactgtcttcagacacaccagaagagggcatcagatcccattacagatggttgtgagccaccatgtggttgctaggacttgaactcaggacctctgaaagagcagttgatgctcttaaccactgagccatctctctagtccctgtttattgttttttgagacagggtttctctgtgtaacagcccaagctgtcctggaactctctctatagaccaggctggcttcgaactcacagagatccacctacctcagcctcctgagtgctgggatcaaaggtgcatgccaccacacctgtgattttatttttaatgaaacattctcacaggagcaaaactttagagatggagagataaccatggaacgagggacaggggttgaatgtataacttgaatacagaaacgtcgcataggagtcctcctggggtgccccgtttcttgagtatgattgttgttccgtggttgtcaaaagtcatagaaatgcatgtagaacaattggatttttatcatctgtaattttaaaaacaaaacaataaaccaccaccagcacaccatctcgtgtctgagagggttaacgtatttccacggccatgtgaaatacaggaaagatttgtgtaatcccttatctattttgaagtcattttccacttgattcatatttaaactttcaggaagccaaaaatggaataaacaatgaggccgtctctctggctacatgcagaaagctttccaaaactgaatcctgtgtttctcatgcctgatgcatgttttatcgggatcaacttgccctcaaaggactccactgagaaacggggtttcaaagtaaggtcactgaagctgagagagactcactggctccaggacatagctgccggtctgtgcacacgtatgtgcatgtgtgctttatttataagaagccaagtcaatgtgacagaccagtgaaagcatgacaaactggctgtgtcccaaaacctaggggttttcatagttaggatagtgtttgaaatacctgtccagaggtgtctaccctgagcctcaagactcatccctgacatccctgaaccaggcaaggcagagtggcgagcgtgggtggtttctgtgatgcaggctgtgtgcattcctgtgacaccaggaagagctttgctacttgtgaaatgcctcgtctaggctagcacattcgggatggatgctccattgcaatggtgcctagcagggactgcactctttccttttgaagtcacatcacctgcttcctcttaaccctgtgatgggtcttactgattcttataggcaagcatagtgtcccaaaaacttagcttaagagacctttgatctatcctgatgcacaaattattttatgtttttctgtaagagtttcatggggtttgttttacttttaagtctttaatctgtctttcctttttattttgtttatgggctggatagttttatgtcaacttgacacaagctaaggtcgtttggaaagagggaaccgcaattgagaaagcgcctctatcaggctggcctttagggcattttcttgattaatgattgatgtaggaagtccatcccactggaaacagtgccagtcttgggtactcggtcctctcctgtataagatgcaggctgagtaagatggaggggagtaagccagcaagtagctctccttcatagttctgtttcttttcctgctccaggtttctgccttcaattcctgtcttgatttccctcagtaatgaagtataagccaaataaccttttctcccatgttgcttttcattagtgttgttaaagatttgtttctagttgatgtgtataagtgtttgcctgtatgtatgtgtgtatgtgtagcacacacacactgcaccaggctagaaggggcattggagccccagcaactgtaggcccagacagttgtgagccagcatgttggtaagaaaaccaggccctctgggagagcagggagtgtcctcctgaccacagagccatccatctcttcagcccttcaccctgtgtatcccagcaactgaaaccaaactaggacatcacacaattgctaattgaggtataattcacataccacaacatttaaaaagcgtgcaggtttttttttgtttgtttgttttggatttttttttgggtttttttgttgttgttgttttactagtttgtagtattttcacaaagttgtgcatttgctgtcatcatccagttccaggacatgtttgtcagctctgacagaaatcctgcacccattatcagttgctcccattcctgtccctcccaatcctgcagccactgtctacggtttctatatagattttcctgcttcggacatgtcatataaataaaaccatgtggtatttggtcatttatgtctcactttcgcttactgtaatgttttaccatgttgtagcatgagcctgtactttattgtcttctgtggtggcataaaagtaactagtttatctggaacctttctgaagagccacctacatgttttcccagggagccatagtgatgtacggggagtgttgcgtctccagcagcagcatgactagttgtcacggctccacatggacaccatcaggtttttagtacagttgtactctgcggtacaaacgtgacatccctggggttttggtttgtgcctacctagtgaccagtgatgctgggtatcttgtatgtgttcattggccatctataaaccttctttggagtgatgtctcttcccaccttttgctcctgttttaattgacttctttgtctctttgttgttaaattgtaacataactggcttcagttttttagtatatgtcatgaggtcagaattagtcaaggtttgttttggttttgtcctggagttttttttttttactcaacatagtctagcaaactgtttccctttgtcaggcttaatacctttgttaaaattcaaatgctcttacaccacagagtaaccacagatttctttgttcagatttagaagtgtaatacataacttcttttcttctcatcagtgaagccaggatggcctgggttcctgttctgctctgtgtgtgtgtgtgtgtgtgtgtgtgtgtgtgtgtgtgtgtgtgtgtagaggtggggggacacctcatatgatgttttgcatgtcccttcccaaattgaattgccacggtgtctatatttgagagacagggatttagaagtgatgtggctaaggatggattaaggccgttactgcaggagtagctttgttgtaaaatctctcccatccatctcttcagtcctcctgttttctgccatgggtttatgcagctctgagagagtccttcactgaaccgatgggcctggattttgaagcccccaaaactctaagttgacgcctttatactcatttagccagtgataatctatgttaacagcaacaacagccagtgcaggccatctcagtggatttatggctcctttcctagagccggggcaggaggtgggagtgtctgctccacagtccttgctcagtggcaacattcctgttcccagcacatctaccatttcacccatcaggaccatcctgggtcctccctgttgcagagactctttgtactacctgcacatcatttgtgtgcttctcaacaacagatagaacattcatgagcggacctgagctcccctgatgctctggtgtggcctgctacctgaaaatgcagaggcttgctgttgcctcttctgcccccagtttcctctcgggcatgagatagcccttatgaacatcattccatattggggtggaatttccagagcttgggggaacccaaggatcttcttagggatgcagctgcactccctcgcttttctgctgtcctctttccttctctaagtagctctgaatgactgtcccagtcagaagtcagtttcagttttctgctgacgttgtccccagagggtaagcattgactgccctgattgcttcctgggttagggtgacaagaatgacaaggaatgagaagaaccttgctatctggaaacatcattgcagaagagataaaagtcaccaagggcattctgtttggtttatgggtagctctttttcgatatttaagtctaacatcactttactccagcatggatttcatatgcatatgcagacgattctggaagagacgtctgtgaaggtttatcttatatcgatatagattgaaacaatgatgtgaatatggaatataaaatgcttttccttatgtctaaactatccttaactgtgccctgagcctctcactagctaatgatggaggatattcattctaacagtttattctaatatgtttcatatagtagctccttactatacaggaaaagtgatcacttgatgttagaaaagcaggcacagtgcacagcttatctttaacactcaggtctttcttcatccattcttcagtgagagagtggcctgcattctggtgcagattttagcctgctcagagactggacgccacccatatcagtagaattgagtgtgagacttttcagtccctgcgctcatctctgataggctggactctgtgagcctgttgtgactacacagggacatttgttttgctttagcagattgtttggtcttgctttcgtcctggttcatggccgttcacatgcctctacttcctgccttgttaacctactctgcctttgctgggcacagagtccagcccaattctcacctcttttttttttttttttttttttctccagtcatcctcattaaagtggctcttgtgcttgcttgggatttcctgcatcaccaaagctcaccatcactcctgctgtgctggcccaagggctgcctctggccacatgaaagtctagtattctggggactcagagagttttcttttcctttggccttggagcaagagtcatctgcacatctaaagacaatctttttcttgcactcagcatctcaaatttttaaccagactgcttcatgtttgggcttatggagttttttttgtctaccattgagtgtttcctcctctgttcttcggacagaagtgctggccagttcttataatgtttgtctgcctgtcctgatgctggacaccaaccaccagtgggatcctttagcatctggcaaagcttcagagaagggctccggggaaatggaactgcccgggaagtggaactgccgggccccttagttcaggtctcactgacttttctaagtctctaaagagagtcaggaagatgctgatattaagagtgctagttaacagcaactctgcaggttttgacacatgtaactaatattgcatatttggaaatacaaaagcaaaatagccaatgcttacctaaacggaatattctagctttctctgatttagcaatctccgagactcactggcctctgcattttccctaccacatatgtagtaatacatctattattttgaaccacaagtctcttttcctgtctgttcataggattttcagttacttgctgctgtcctgagcttgccaaaccttcgagtgcttctgcagtaattagcttattgtttctcagtttggtattactgaaagactaagctgcagactcgtggagaattacctgaccgtcaagaatggtttttaggtttgggagaggagttaaatgattggtcagtaaacactaacactcccgaggggcccccagatgtagtttgcctgcaagtttgtaaaaaggataaaaaaaattttttttaaataaagaatttaaagttgagcattttctgtaagagcaaactataagaaagacagaagattttacaggttttatttttgtttttgttttttctagaatacatacttggtccttctgcttagtataatagccactcggtccttctgaactgcttctcagaggacctggagaacaaagattaagcgtagcattgttattaagcgtagcatcgttatgctttcggagagcaggccgcatgcctccctttgtgctgatcttacagcttcatctgaggagctcccaaacctgtgcacacccaagctttaaattacgaaaaagttatctgcgcccagagtgttgtaaattagaacacttttccggttcccagtcccctcatgactttcagagagcaagtgttttcagtctttcaacagacttttgtatctttttgcccttagtacatttcaaagaagagataagaatctcagcggtctctcagtattccaagcaatagacatccctgccgtcagaatgaggaagttgctctatttccgcacttacaatccttcttgtgaatcccacagccctggtttggcctttcctcaaatccatctttctttatctcagctctctggtggccgagtcagttatttggtgaatggctgccaaatcactcaccttcccagcatcctcttggagccgctcagcaggatcctccctcgctggttgctgtcaggatggaggctgaggcgggtgtccagggaggccagcgtctctggcacttatcttccttgagtaaagaaaccaccacaaacccctagagagcctcagatgaacatctggataaatattcagtttctgatgcttcatttgaatctcgggccgtccttactaaatcacactgaacttcatttaaacccatgcaaatagaaaaagttcctgagttttccccaataacaacaaaacccaccataattcagtccactcttccgctttcaaaaacttgctctcagtgtagcatgtgatctagcagggctctaagcatggtgcctgggaatatagctccaacatccgggtttacccgggccttaatgcctgggtagtgcttccgtgtcagacatcatgttaaggtgggttttgttatctttgctttccaggctcagggataaaatatcctgcccagattcacagcccttgccttgaaagtgtttcagtgaaattaacgaagtggaagtgaaaacaggtgatcacagtcacaaaatggctaggtagatcttgttcacacctagccatcattctgctcctgatttcttatgaatctaagtcagaggagggctgaggacagggttcagtgacagagcacttgcctcacatgtaggagacaatcagttacacacacacacacacacacacacacacacacacacacacacacacacaccacatacaaaaaaaggaaaaggaagaaagatagataattagtctttgactaaaaaggtcttgatattatgtcaagaacccatataattgaaaaaggcccttgttctgcctgctccttgtgtctgagctgtctgctttgtaatggccatgtgactgcccttctggtttcaggttttgttttgttttgttttgttttttaagatttatttgggggctgtcagagccatgaagctggggttacaggcagttgtgagctgccttacaaggatcccgaaaaccaaacctgggtcccctgcagaagtagcgagtactgttgatcacccagccatctctccaacagtctgatttcatctcttttgacaggtcaggttactgcttacaaaggaagaagggatcttgtctctttgtcttacttataccatgagaggaggaatttgtatgtctcatacacaggctgccatgttctaatctaggggggctctgccacatggcagaactgaaaatgggtttgctaagctgcaatctggagagcctcttccagaccagggttttccaaagtgctcttctgcagcccccgtgacgctcggcatgactgagcaggtacccaggggacaagctattcttgtatttgcaggtttgatacttgctcaaaccctcactggggcccgatacctcacttgatagtcatctgtctattagagtagcatcctctttctgtaaggtcaaggtcaggcaatggctgggcagggccttagagagccgtgtagtgtccagcgtcaattctcagagtcttcactcgctatttggagttggtggccttttcttcatgtatttgttctttttctgtgagcaggtcctctgtgaggtcttgcaaacacaaacaataaacttccttcttagccctgaggaaagaggcataaggaggaaaaagccacaaagagccaataaagaagatggagaaaagggtgtggcctggagaggtttggggtactaagtgccaggttcacaagaggtctgacgtttaggccttaaggtttgagtccagcggacatgaaggaggatgtgcttatgtgaggaaaccggtttatgcgagttagcctgaaaggtcatggtgtattctaacagtgggagagcttagttgtgcgtgaccgaagcgtaagcactcataggcttgggtgcccacagagcaggctgaggccatgcgtgtaaaggattctttctgtcagcagggttgaagtctcagctttcctgtgatgggcagtcaactgggcctttaaacatacatgagtttggatctttaaaaaaccacccctggtggcaactggatgaaacctgcttagcccaggagcccaggagggggacaagcttaccccaggcaggtggcaagtccacgtccagcccaggcagaggtgcttgaacgtggccagacaaatgtgcatttgagcatccggcttgatggctacgttctcagactatcttagtgcaaggatattgaatttccctagacctttagataacactaagacacagattaattctctattttgcatttagtaatgtagaaaatgaatccaaaagagtcggctatcaaccagcaggtacagctctgggacaaagagcctccccaccccacctccctttgcagaacggtgtttctctacatttacccaccacacccccaaggttgccccttgtagagaagcctggtgagagggtgaagaaggacactttgctttttggatcagcgggaggaggaggtcttggggaagcctgggctacacagcaaagccactggactgtctgggggagggaggtcctgagaatcaatgttgtcatggctccattttaatttttatcagctggatacagatgaggtgtcagtttcatagacttgatgtttttgctcagatttttggctaactgatgcttttccatggtttctgacagttatttttatttgataatgaataataaagtgagatttgcagtctacatctgacagcatttgttttattttgacagttcttttctagacagcaaaggttttataattaggttttgtgtctgccaaaatgttgctgaaaggaaaaaaaaaaaaaagaacatttctctggaaaaaaaagtttcatagtttccagcctgcaaagctggaaccatcttattttgatttggaagcttttgcaaaagtcagtcaggaaattaaaccaaattttcttttgaaaatgaattcttatcaggagaaaattaaccctggctatgtagagatttaggagggagaattagaaggggtatgcttgaagtatggtatttcaatagtccttgtaaaaatcttcatctggatggatataggaaactcccttttctactgttttatgagagcacatgcattcttgcagtgtagaggtgccacccccagggggcgctgaagcctacaccactccaccacccccacccccaccaccccacccccccccccccagcacatatggaagaatcaggtggaaatcataggtgtggcaattgacaatactttctgcttaaagcactcttgaaaagctgacagaggaagccatgttgctgaccggagctagggaggcttatcattgctaatggcagaaacagcgtggcgcgataatcacagaaacagtcctactactcactgccttggcccctggccgactggtgcgagttcctgcagtagcggcagtggccggattcgatttacaatgttttcctctctgactcactccttcagactacttacgatcagatagatcagatcccagacacagccgcccttgtccccaccacctctgatctccaccgctaccaccatccagtactttccattgagcacaagtatgtgggaccgataaccacatagtaactagtatttcaaagaacggtgtctgcttaaaaaagagacaacagcctcgtctgtggtactgtggcacttctgtttacagcgtgtagacagctgagcaaaacaggatctgtgctgccccagccattcgtggcaccaggttataagtattcccttcttgatcattttttaaaaatagtttatttcttgagcttatagtataagtacatcatttctcccctccctttcctcactccaaactcttccttatacccctcctcgctctcgcaaattcatggcctcctttttcattatgttttatgcatatatgtatatacatatatactcttaaatatataaatacacttccagtctgtatagtgttgtttgtatgtatgttttgggggatgatcacttagggtttgatagccagctggggtcctcttcactgaagaagtctatttctcccactctcagtactcctcggcttcgagtgtattgttgagcacatgtggggctccttctttgaagtgttgatgtattggctatagagtctgacactctgagtattgaaggtgatttggaatgtgtgttttataaacttgcatgagtgattgaaccttgagtttggggttgggagaaaatgcaatacgggatgcatagaggtgggtaaggggttcagtgccctgacagcttttatagaggcctggggcttggtttcaggaattcacatagcacctgactactgcttataactccagctcccagagacccagtgctaccttctgacctctgcaggcacctgcacacatgtgcacatgaactcacagaagaacacacacataaatattgaaagaaatcaatggagtttaaagaaaaagtcatatacacctttgatatcaaattatgagatccattgtcaccaggcacatgcagaagagatcttaccttcatctagcctaacctaagacccctctacactcttctctgtgaagcaaagaaaggagcatgtgtcagagactgcatgagaagcctctgtgataatggatcctaaacatcttttataatagcaataaaagaggcccctggaagtgactctcctccctctgtctcatgggaggagtgcattagctctgctaggctgatgatgttgcttataccttgcttagggaaatgaagctcttttaaaagcccacactacactaggaatgtcaggccctggcactataaggcagagactggagctcagaagtcctcactagatgcctagcttttccattctcagctacttcctcctccttctcctcctcctcctctatcctcttcttcctcctcttcttcttcctcctcttcttcctcttcctcctcctcttcttcctcttcctcctcctcttcttcatcctcttcttcctcttcctcctcctcctcttcttattcctcctcttccttctcctcttcttcctccccctcttcctcctcttcttcctcctcctcttcttcctcttcctcctcctcttcttattcttcctcttcctcctcctcttcttcctcctcctcttcctccttctcctcctctttctcctcttcctcctcttctccatttcacaagatcattataatctagacttttggaaatagctgtggatatgataatagtcacaactatttattgaacactcaggaattaggagccttggcaaaaataatcctaaatggtataatgctgtgggaaataaaataaaaaataaagaactcagcaagctcctgctcttgttccgggcacctctctaccttgatggtctggctggccatgcactggtgggcaatggctgacctgtttttacctctgactcagagctccaaaatctttccatccagctctctaggttcccatagatgggtggttaccacaccagccccatgcttcaaagccctgtgacctttgttgcacctcaggcaaacccacactttgccactgtccctttctctcttgaacccagatgagcctctgcatgaaggaaaatggaacacaatcgctgggtgcaacaactaaaatcctaacttgtaagccttattaaatttaaatcaggtggcaaatcccaatggatccacctttgaaactgggagacactcataattacatcttgtcctcatgctatccctgtccaaagaggacctaactctctcctgcttcctcttttcctctgtccaacctagaagtccctcctatttgcccagtgactggctcctgtatttattagatgattggttcataagaacagcaccagtcatatccacaaaagtataattttattctaaccttaaaacaggaggaagaaattatagtcttcacaaggaagatggagaaactgaggtagcatgctgtccctggtcacccagtagtgagtagctgcccttagctgtcagttatgtctctgtctaatcttaggctttggaatcttgtgaaatccaagtggtacctgatgttgagttagtacttaaacgttttgagttattgttttccatagacaccctgtgctgtattatagagtcctctgtattcaatgcttagggctctgtttcagtccactatgtccaccatggtctgaaaaatagtaagtggaaacttacaaaataaatagcttccaaatttttgtttttgtttttgttttttttcaagacagggtttctctgtatagccctggctgtcctggaactcactttgtagaccaggctggcctcgaactcagaaatccgcctgcctctgcctcccaagtgctgggattaaaggcgtgtgccaccacgcccggcagcttccaagttttaaactgcacttccttctgcatggaaacttgtagtgcaatgcagtcttctgtcccactggtatgtggaatgttccttcatgcacatatagtgtggtaaccaggtacacaagagcaaccacaggcacaaagctttgagattgggtctttctgtatcatctaggctgctctcaaatgcctggactgagaaacatcttccttcctcagctaggacaacagcctttgccactgaacacttttaaaataacttttacaacagtatactataattgttctatttcattgttattgttgttgatagtgactgtgcctaacttagaaaccatactttatgcggcaggagaaatgggtcagcagttaagaacactggctgctcttccagagaaactgggttcagttcccagtccccacatggtggctcacaggcatgcacatgttgcacagacatacatgcagatgaaacacccatacatataaaaataaaaaataaaaattaaaggaaaataaattggactttattataggtgtatgtataggaaaaaaacagagtgtggttccccgggtttcaggtatccacaggatgtcttagcatccccaaggacaagagagttctgtgtggaatgttctatggagcaagttagtcctactaccctcttatgattcacttgaacaatggtggttttgaaaagtaatgcttaagtataatatgcatgcacataaaatttttgcatatatttgcatatctaagtatttgtatgaagttaccttagcacctgggtactttggaaagaaatatgattctacaaatttggaacacaagaaataccactgcttcttctctatagtccaaactcagtgcttagtcctgagccctcacctggctcataagagaagtgaagcccttccctgccttccctggtgtgctgtgaataaagtttcatctcgccaacctgcagagaaggaagggactgggcccacttctcctcccagctgccctgtttgtaggctttgaagaagccgttgcctttcccaattaagaaagggctctggttactagagaatgggttgataattcagacaccagtttcagtgctagaagttttcttccagggctctgtctctgtctctgtctctgtctctgtctctgtctctgtctctgtctctctctctctctctctctgtgtgtgtgtgtgtgtgtgtgtgtgtgtgtgtgtgtgtgtgtgtgtgtgtagctctggctatcctggaactcactgtgtagactaggctgatctagatctcaaagatccacctgtgtctgtcttcagagtgctgggattcaaggcatgtgtcaccatgctcagtgctccaagacaaatcttaaaaggtctgctgtcctcttctgaaggagcattgggtcaccaagtgaggcgcccctgagttttctcctgagctgtgaaccccagttctcatctcctgcagcatgcattgttttccagtgcaggcacactcatccattactttgcccaagcttattcacgctggaactcatagaggattaaaggtcttttatcagttacatgtcgtgttggagcctggttatctctggcactggagcacagtatccagtgggagaggagtagagagctagaggcaggggagattttcatcatcttcttcgagaaccatttaacaagagtttcgtggaaacctatccttgaatgcactctaaaaggtaaaacagctggaaagtataccatgcctcactttttagagtctggacactcttaggcaaagtccttgaaaccctgactaccatttgaaaagatggggaggcaagacagggtcatgaataatcaaggagttaacatccagaaagatacttcagcctttaagattgctgggggaggggcatgctggagagatggctcaaatgttgaaagtcttgaatgctcctcctgaggacctgggttccattcccagcacccacatggcagctcagttctgaggagtctaacaccctcacacagacatacaggcaaaacgccaatgcacataaaataaaaatgaataaattatcactttaaaaaaagagcttgtactgctcttgctgaagacctagttacctttacacaaaaggtaactaggctgtggctcacaaccccctgcaaccccaggtctggaacttctaacctccacaggtgcctacattcagatgtccatacacacatacagacactcactcacatatagttcaagatgtttttaagagagcagtagcattgtcatcctccacccccaccccatccccagtaacagacagagcctcagagataaggagtttctatgaaagcagagagcattgcgatggaattgtggtttttttggtagccatgagcaattttaaagaggttggcacatggggtactttttgaatgaaaattgaggaagcttgctgagttattttgaagcaataacccttgacctaaaagatgagaagcaggaacagcactaggccaagattgacagttaccagccagaatttatatgcagaaactcgagggatctcctaccgttcgtataatgtatgctatacgaacggtaaagagaagagggacagctatgactgggattattcttgaataaggtaacatgccctcttccacccctgccccctcaagatcgtgaggtaacatgccctcttccacccctgccccctcaagatcgtgaggtaacatgccctcttccacccctgccccctcaagatcgtgaggtaacataccctcttccacccctgccccctcaagatcgtgaggtaacatgccctcttccacccctgccccctcaagatcgtgaggtaacatgccctcttccacccctgtcccctcaagatcgtgaggtaacatgccctcttccacccctgccccctcaagatcgtggttctgtaaagtcctctgagctcgttctcatcaaatggcatatgcgcatgagagccccctcttttcataaccttagcttcacccattatgttcttgcctgtgatggtgtgacacaagtgacgccattttgctaactttcatgtactcatgccaaggcttacctgtgtttcagataacggtgggcagactaggtctggaggcaacaactggccactccgaggaaggaaggggaccctgtgggaagggggcatccgaggaacgggcttcgtggcaagccccttgctgaaacagaaaggcgtgaagagccgggaactcatgcacatcaccgattggctccccacactcgtagatctggctgggggaagcactaatggaaccaaacctctggatggcttcaacatgtggaagacaatcaggtatattcatgtcttgccccattcatggccaggacagaaacaccagcctgtggtgtcgggtcagggaggaaagtattaaaccaggaaatacataaagaagcaagatgactttggggacttggggtagagccaagtgtgaaggcagtaaacagtcacccctgagcatgagagtcaccatacaggagcagggcctgctctcagctgtagagatggtcctgcttctggttcactcacacagtgtggaaatgcgtcctgcaaggaaggaaggtgcgtgccctggaggctggaagatacctgcttctttggagtacagggaaggaaacctgaatctagcatctttatctaaattatgttagcatatgttttataacacatattttagcataagttttatgacatatataacttcgtataatgtatgctatacgaagttatgtcgagtaactttaaataatgccaattatttaaagttatgtacataactataacggtcctaaggtagcgagctagcgtccagtttacacataaaatcacatgtactggaagcaaatgactattgctgtgcctttcagcctctttggtgtgctgagctcggtttggggtgtctggttggaagtcctccttgtggtcctccttgtgcatcttccacatttttctcagttcaaaataatggagtttttgggtttctatacataggaaatccacaatagaggacttagacgtaaggagccagggtgtacatggttcataaaaaggttgtgtgtatgtgtgctttgtgtctggggtggatttaaggctccagtattagcaatctgagaagataggtaaggagcatagatggtcttgtactatgagttttttacaactttttataaattgaaattatttccaaataaagtgttttgttttgttttgttttgttttgttttgttttgttttgttttgttttgttttaaatagaaaggtctggcagtatttggcctgaatttccacaagactagccagtgaatggaatcagatagtggcagtcttctttagttgagtgttgactttccaagttacctttttccagtgcccctggctgctttgccctctggccggctgcactcgccggtgaaacccaccacatccctagccatgttacccatgttcacagagttgtggtaccaacactgcacatgctctaaatgagccaatcccccactgctggccatattgcttcttttctttttagtattctcttttttaaaaatcattttaatgtctaaaaaatagggggatgctgggatatctccttaggtaaaggtgcttgctgcaagcctgacagcctgggtttgatccccaagacccatgtggtaaaagaggagagagagagacagctgacatgtatgtgcaggcggaaagtggccccaggaaggctgcccagcagggagtcagtgttaactcaggaatcttggaggggaatgtgtgttagccacgtggagttagggagtcctccagccatggagctacttagggcttcttaaaaataagtctctctctctctctgtgtctctgtctctgtctctgtctctctctctctctctctctctctctctctctctctctctgtgtgtgtgtgtatgtgtgtgtgtgtgtgtgtgtgtgtgtgtttcattcgggaatccaaaacatctggcaggtggtgagcacaccacacccccttgccggggagtttagagtggattaacaattattgcctcaacatcttatttaatatctttattaagagctgtttgaaaaaagtaggcttttaaaaagttctaaattttcattataaattaaaaattaatttcattttttaaaatctcaatttggtcatttctaaaacaatatacaaaagtacattgagaaaaacaagaccttgttgtattatatccaaaaagaaaaatctgtaagtaaagccaacggtaatgaaaaagccccgcaatacacacccaaaccaggcaatcctgattctctgccaacaggcagagagcaagcctgccactgcagccgggtcagtcctcatctcagggttgcacattctcttctcagtagatgatggtagagatgataaattgctctcttctctgtcctgctctgttcatccttgggaggggacaagctcacagctggtgggacagctgtctgtcacatttgcaccagggattgaagctgcagggagctgtgttactgacctcagggttcatcaccctggtttttcttgatctctctaggctgtctagagagggaagtgctacaatattatggtctgtaatccccagccatcgcagcgtatcctgtgacactggcttgcctggctgtaatctccaacgcttcagcctgcacagggaggttgccacatcaggtctctgtatgtagtaagtggatccttcacccgagttagggccaatatgctagtcctagacgtagagagtgccctgtaagccccaccccattccttttgtcatctttggcaatgctcgtggtatggaggaccatagatgtggataacataaagcagctaccatctgtgaccttatagagaaactctacccctgcctctctctgctgccccatctcccttctcaccctccacccaccctgcacacccttccatctcttgcttccacacacatggacccatgtgtgcattcacacgcattcaaatatgcacacacacacatactctctctctctctcttgcatgcacgcacttatgctcgagaccacacacatgcaaaaataagtaaagaaaatatgaacaaagctgcttggttctgatgtgctcacactgtggcatgctgggagcccattcagtttttatttttgctttgtttcatattagatatgtatactagttctgtggtacattttggtcattctgagaaaattcctttgttcctgatccatgggctgttattttgggtacagttcacatcattgatgtttatctatatcaccagattttaggtgataaacccatatttcattaagactacctcaatcaggagtgacctttaagagtctggtttctatgtgcagagaaattggcacaatatgtggtcaccatataactccaagttgccgtctttctttagcactagaatattctcttgctgatcaactccttaggtgctctgggttctttgggactgttaccaaaactatggccaagtatgatgtattgtaagtgggcttccttttctgctgttttttttttctaaagtcagattagtgtctacagtttaatcaaacatttccaggctcgctctgttaaaaatctagcaaattcgtattccataagtgaagaatgactttcaatcttatcattcttgaaaaaaacaacaacaacaaaaaaaaaaccaacaacaacaaaaatcctgcttctgcccctggctccatgtaagtgtttccacatcagtggcagcaggtacagagaaagtggccagtcacattggagttggatccaccttcccaacgcagcacaaacaagtggccagccaagtgtcagacacctgatctatgcccagagccgatggaagatttttttccagacatggaaaaatcatttttttaagacgatgttggttttttcagctctcagcagaggtgcatgaagtgggcatgacagtaatggatggaagtcagcaatggccagtgcagcagaagcccccgtctgtgtgtagacataaattcttcttaatcttgcttcaaatgttaaacttcaaagagaagtatcaagaaccctagggttgtcctaccttgttttctattgctgtgatataacacggtgaccaaaagggccttggggagaaaagggttgatttggtttctactcccagatcacgatcatcacagaggggatgcagggcaggagtgtgaagctgaaaccatgcctgctgcttaccaggtgctcactgaatcatgctttgcaagttttcattacagcccagcaccaccaccttagggatagtgctgcccacagtgggcctggctcttctgcatcaattcttaatggagacaattattgcgggaaatattaaaaaaatgaactggcacattcccttgctagtgctggcaactggcagggcacgaggctcctgctgggtgatctcactcggaggaggtccctctgcctgccatctctccagcggggaggttgggggagggcgagttcctctcactatcatgcaacaccccacacaccccatggtcagccatctcaataccttattacccagtagaatcaaaactcttaaagcttatgattatggttaactaatcagatttatgtatcaataaaaatcacaatttacaagatgccagtacaataattttagagccaattagtaataataaaagctttatcccaagtgtgctaaggattatgaaatcatcaggtcagcctccattctcctcccctttctctcctctgttccccttctctgcaactcttagctccgcctcccttttccctgtccaatcacaggcctcctctgcactaatgtaattggacgggaaaatcttgtgatagacaatagctatgccaggaggaattccgcaatggaaactttcctctcagctgactctaggctgtgccaggttgacagttaaagctcagcgggacagtgatgtcatttctctccctcccaggagcactcagcacttggacctgccaggttaagcagaggagacagaataccatgatggcaagtgtgtgcgaaagaggcagctgttcacttcatagcagccagtagaagaagagggcaagaccaagacatagctttcacatacacttactcagagactcgtgtcctccgctgaggccccaccctccagacatgcatcacttcccagtggtcgcatcagattttggatctgtcagtggattaaaccgtgtgtttaggtcagagccctcatgatttaatctttcctgaaaacactgaaaagtgtatgttactaatcttctagacatcttttttaatccaatcaagttcacagccagtcttcaagtttatcatcttctctcaaagcccaatcaccagttaagtacagatggtttgttttccatctcacactttggtacttttactgctaaaagttaaactctggtctcttaactaaactccttggacacatacaatatcatcgccgtagtgcagcaaccgtgaactagcaagcaattccagcatgcatgtcttttccaggtggctgtgactagttggtcatcctctttatgggtccccttcccatgccaatcatctttgattcaacgtcaagcatcacaaatttacgttggtgactgccagcctttctatattcttatgactcttcttgcttcggtcagaggtgtagttgtcagttcatttatttgagtgatgcttttctgaaaaatacattttaaaatttactctttgagaatttcatgtaaatacacagtgtattttgatcatgtctacccctcagttccccaaacttccaaatccccaccaccacatcctatctctcaatacttcatgtccttcctccttttatataatccattgagtacagttagttctgtctatatgctcaggggtgtagggccatctattgagcatggtcgacctaccaggagctgatgaaaactgacttttccttccttgacagtcattagttgccaaaagcaccccagctagagatgggttcttgtgagttcctccctgaccagtgctggaattttgactggcttgattttgtccatgtcttaggcaggtagccacacctgccacgagttcataaaagcaacactagttatgtccagaaaacactgcttcgtagcaggccttcccaatcgctgttcttccagtctttctgccctctcaatggtggtatatagacatttgagataagcctattgtgtaatagtggcatgaatgttgtggaggtaaccaactgctttctgattgggtttcaggcctaatccacaggacagaacttatacctagtactgtaagcatggccaagagcccatgactgacaagatcataaaccccgtgtgagaatctactactatcattttgctacatgatcatagtatcaaattgccttctaagtacttgtgatggtttatatatgctccactcaggcagtggcactattaagaggtgtggccttgttggagtaggtgtgtcactgtggagatgggcttaaccctcaatccagctgctcagaagcaagtattctgctagcaaccttcaaatgaaaatgtagaactcccagttcctcctgcaccatacctgcatggatgctgccatgctcccaccttgatgataatggactgaacctctgaacctgaaagccagccccaattaaatgttgttcttataagagtccccttggtcatcatttgtgttcacagaagtaaaaccctaactaagacagtacccatcttcatatccatagattagtgcagttctcagccctatcagagaagctgctttttctagtgatgggcagctaatgctaagtaacgcttttgtgacttaattaagcaggcttgggacagtacttactctggggccagttattccctagcacagagtcaaagccttctgtgcccattgctggatgagctatgagtacttccggtctgggacaccacgagctgttctcacctggtgttgacatggtccctttcaacctttcagatgggtttctcctggtagtaagttgtagttaacaatactctaagggatcctctgcaaagttcctagattctacttatttagctttctcttctctggagctctcttccttggactctttgggctttgagctctgtgtctttaatttggggagtctgccaggccccctttcttcctttcttccgctagcacttagaaactccctcaggctggggtagttgcgtggcttagtttttcccacccatcaggcatcactgcctctgacagctgtctagtgttttgctttatacattctatctggtttttgtcctttgtttttgagttgtttaggaatgatagtaaataaatcccatttgcccatttctctgtcttagctaaaaacagaaataaccaataagaaatcgattgtgccctttatttcattgtgtctaccttactttccattttcatgagttctagtttctccctcccatagtaaaaggaggtacttttggtgttttagtcctttgaattctagacttggtccctggaccacactacatgttctggagaagatggtatattatgtagcaatcagttatagttcttgttttgctttacggtgaaatgtgagcatgttttactctgttggtgtcctggctggttttgtgtgtcaacacaagctggagttatcccagagaaaggcgcctcccttgaggaaatgcctccatgaggtccagctgtaagacattttctcaattagtgatcaaggcggggagggcccaggtagtcctgggttctataagaaagcaagctgagcaagccagaggaagcaagccagtaagcagcacctctcattggcctctgcatcagctcctgcctccaagttcctaccctatgtgagttcctgtcctgacttcctttggtgatgaacagcaatgtggaagtgtaagctgaataaaccctttcctccctaacttgccttttggtcatgatgttttgtgcaggaatagaaactctaagacaattggggtaacttttatttacctgtatgttactacaattgtcattttaattcttagctttgtcattttgtttaatgttctcctgatacctcatatttgttagcaatcttaatattttgagcagtttgtattttcttcaatcgctcaccaatatccttctgtcattcagtaattctcttatccataagggactccccgagcttgttcagccttaacctttctacttcctagatcgtctagctttattattaagtttgctatttctactttgtcagagcatgtaatatggaatactgtgttctcctagccacagttttgttccacaattagaccttcaatattacacttaatactagacagccatttctgaagcatccaccacaattgtcttttcattgaaagaattttcctcagataaatttctcaggattctttagattcttatatgcctatcagaaacatttttcataagcttaataattgaagaatatctcaaatgattaaaaaaaatcctttgtctcatactgtcttccctcgggttttaaaactgttatccgtgtctttgcttgtttcatatgttgctatggatcaatctaatttccacccaatttaattttcttggcaagggacaggtcctttcatttggaggcccaggagattgttattgtcactgttgtgacaaagactggttagttatgtctcagaggtgacccattctgggtcacagacaaagtaggttctttcagttatacatccaggcctttcattcaagatgtttacagttgggtttaaacactgtcttccactatttcattttcttcttcaggagctccagctgtacatttttggatcttctggcagtttttgtctgacctcttaaaaaattatcttctctttttatttctcttctctctctgccttcacatactttgagttactgtcatgtccctagtttctgagagtttttctttctgctgctgctgctgctgctgtttcttctttctttctttctttctttctttctttctttctttctttccttccttccttccttctttcttcctcaaaaagttgcagatacattttttaaaagaattatttacttattttatgtatatgagtagctgtcttcagacacaccagaagagggcatcggatcccatcaccatatggttgctgggaattgaactcaggacccctggaagagcagccagtgctcttaaccactgagccatctctccagcaccttcttttttctctagatagtgcatgcactgtggtcctgctgcctgagacccactgtgtagttgatgctgggttcaagcaggctacggtaatgctacttcagctctggattataggactgagcaccatgctagtcttgcttattgatttcttcatctcattttcttcccttaggtcagtacctaaggtcagtacttagggattttgaatttccagttcctgatgttttttgtgtttaattctactcagaaggttgagactcgatactacagttttcatctatccacagttactgaattaattatgtttgcttcatgctgaaataccatgtgacagttttcctctgattgtgtctttctttccatagtaggaaagtagtttccatttgccaaatgttttgaattctcgttgctgtatctttttcaatttccctggaaactcgggactcttatctgtcgccttgtccttgttcgggtgtgtttgctttttttttcctagacctgcgatagtagaccatccactggggtgggatttgggtactttaatttcttcctcaattcaaaagaaatctcagagtgaagtgtgtcggctcatacctgtagtctcagccctgtgacaggagaccactggcacgctgaaggcgaactgggctgcagttttagaacagcctcagctgcagaggaggagcccacttacaaactccgggagaaaaagagaagaaaatcgcctgactgtggcagagccagatggtttctgtgatgatgctgcctccttgccgtggtttgccctcccttgaactgctgatgggctgactgacgagtagcagaacctgttttccagccacttctacctttgctatccgtcgtctaagaagataccgttcttctctcttggtggcgtgggccatcactgagatctttgcctacactctcaagccacctttctctccaactacccaaaggcccctatcccagcggtgtctgggcagaaccacatccgagcctctgttccagcccctgccatttctcacccagagaaacacaggttgaaccctagcttagactgtatccccccccaacacacacagcagtgtcagcagcccacagtgacaaggaagaaacaaggcttaacaccccagttctttttggcatcccagcagtgagacagagatgcagaaaacagtagcattaattgactgttttgattcccttctatattaccgtgtctgtgctcgcagcatgctgtactttaagggtctttccccatagtgtagtctgtatctcattctaggaagctacatggcacaccatcttgctcttttgccatttgctgcctgtatggatatcaacaagggagccaatgaaaatggacacagagctaccatctctgagaacagtcagtgggtgatcactgcccgtttttgtcttgtgtagacccttcttggtgaggctggaggtagataaagtggatgcctttttaaaaaactttctttggatcaggttttgatccttattgtagatccaaaactatgctgttagtctcgccagcatggcgttgctaacgtcccctcaggacactggcagcgggcctcctgcctcctgccaacactgctgccagctctcatcttctgaaaattcttcatagtaaaatagaaattggaagaagggcttcttatcccctatggcttgccttgctactaacccaagagtctggcccattgcattttagtaatcaatacgaaaagagttattaagagttttgagattatgatgttttgagaattactttttccttgagtattctactttaaaaacttaataagctccttaataaaaataaatagtaatgcaaaatatctccccatcctctagcaaataaattcaacttacatttccttaccagattttgtctaaattttataatccccatgcctaacctcttttcttatggtaatgtttgcatgttacagggattttcaaggaacgtgggtcttacatagagccaatacccacccacccatccacaagcagtgaataaaatacgtcctgttagtgatttccccagagtaatagtttcaaatgtgtactttgtggtcagctctggttcaaatctcatctcctgtgtttattattcatgtgctgactaaaatctccaggcatcaatttcatcgtgcgccagacgtgacccagtctgggaatggagctcagggggacagcagttgcctagcacacagtaggcagttgcctagcacacagtaggaaggctctgggttcaatccatagctctgcaaaaatccggttagttaaaataatgtgtgagcacagcggtaccatcttgttagcactcacagcagagtccaggagaaatgtatgagaacacagcacagggcctgggtcgggaggagtttaggagctgctgaggaaggtgtccgagctcgcacatgcgtgggaattacccctgcaggactcttcgtgtttttagcagcaactagtttgggttggtttgtttgtttccttcaaactttctcagaaactcttgatatttccttttctaggatgtgtcttttgtgacagatagtaagcatttagcaataaaaggaggagtaatataatcacatctcgttttttgtgtgggaaggatttgctgtcttacccttcaacatggagcacaatggctgtcaaaagctggggactttgtaaatggatactgatgtgacctcaaggtctgaaactctggagtcctataatgcattaagacaggtggtcactgggcaaggcctcttcatcctatgtcaaataaagctaatatagaaaatatgaactttaaggtgagtttaaatggaaatattgaaaagtcaccaacgacagcagcattttattttgtcagtcatatgagagaaaaaatggagaaaataaatggcatgtttgttaatttgcggttaaaggttagggtttctgatgccgtgataaaacaccatgaccagaaagaagcaagcttgggagggaaggatttgtttctcttatacttccacttcttggtccattattgaaggaagctggaggcaggaagtctgatgcagaggccatggtgcctactggcttgttctccgtggcttgctcatcctgctttcttaggacacccaggatccagagcctatgggtggcaccactcacactgaactgggcccacagcagtcattaatcaagacaaggtctctcaggctttcttcagacaaaccggcagggcattttctcaattgaggttctcttatcccaaatgactctagcctctgtcaagttgacatgaagctagcctgcataaaggtatttgtttatggaatcataaaagtaagctagatgtatggcataatacattcaaaagatcctggggctataggtaaacatttcactatggagacagtatagcattgaggttaggagtggagattaggaaatccatcagcctgagtttcaaacccagttccaacatctgctcaaacaggggccatgttagtaactgtcataattaaggtttccattgctgtgaagagacactatgaccatggcaactcttatgaaggaagacattcagttggggttggcttatagatcagaggtttagtccattatcatcatggtgggaagcatggtggtgtgcaggcagatatggtacaagagaagttactgagagttctatgtcatgatccataggcagcagtattctacactgggcatagtttgaacataggataccccaaagcctacacaacagtgacacaattcctccaacaaggccacacctactccaacaaggtcacacctcctaatagtgcccctccctatgggccaagcattcaaacacatgagtctttgtgggccatacctatccaaactaccactacctaaccaatcgccctagccaaggttgggtctgtggtattgaaaattaaataagattaatatatgtcaagtattttaaacttttataagtttgattgtatttattattattaataataataattattattattttgcgtgtgtgtgtgtgtgtacactcacatacatatatgaacgccataagacagcattcaataccatggaactggagttacaggtggttgagagctacccagtctgggtgctagaaactaaatatgagacctctgcaagattagcaagcagtcttaactgctgagcaatctcccctggggcaagcattttaaagtctgtatcagagtttctagttttcaatcaagccttgccaaacaatcaagagcctaagctagccctagtctgcttgttcagggcatggatgagacatcccctgtgtggttgaggggtgtcctcagtggttagaggtaaacaaagtggttctgtttttttcttaccttggctctctatttcctgctgtggctggccattctcacaggccctgaagcggtgagcacagcacagtcatgttgtctgagctccactgtaataaaagcaaccattgcttggagtcacataagatcaggtgtatgattaaaatatgtttttttcccacaaacatcagcagccatgattgaaagatgggatttcccagatggtattcatagcctgttggaggcaatattacttaagcagctaaactttcactacctgttcgaatgcctccaaataaggaaaagtcataggtaggtcctggagtgatggctcaactacaaagtgcaccgacctctcttccagaggtcctgagttcaattcccagcaatcacgtggtgttatagacattttggggctggagagatggttgagtggttaaaagcactgactgttcttccagaggttctgagttcaattcccaacaaccacatggtggctcacaaccatctgtaatggaatctgatgccctcttctggtgtgtgtctgaagacagctacagtgtactcatataaataaaaataaataaataatattttttaaaagtagtttaaaaaatttcataggtagcagattgcatctcatctttttaactgtggagtttgtaatgagtaggctgaattaacatgatgtgttaacatgataaatgggaggtgctctctcatacaagagagaacattacatgtcctagaaattaaagttaactactatctgactctattttataaacagaatgcagaagttatggttcagcatctattgacttttatctgtgactcagaatatggtcttgggtcattggttattttctcttacaaatattcactctctattatttcccagacaaaatgtataaggcttgcagaagtctttgagatttctcagttcaccaccctcccatcccaggcccccatccacagatccacacccatgttcaagaaacgcacgtgtgcttggcctctagtctctactgaaatcaatgcgatggattttagattgggttttacttttatgaaccgaagtcttgttatgtagctcaggctagcctgaaactcatggtctttcagcttcagactcttgagctactaggattataggcacatattctaccacacccatcaatgccttcctgaaatgatgctgtttaaagagacagtccttttaatgcacctgtactgataatctactttgtaactatggatagaaattacacagcccctcccaccacctatcctcgcccctgttttctcttcctttctaggaatttcctttttcctatcttttaactcctcccaatcctaagcattgagaccctgaaccctttactgaaggcaaaagaagtgaattcagcaatggaacttgagactgtgtggccctaaagctgttgcaatttctaactacagataaaggcaatcttgttcaaagacctgcatggagacttcaagactcctgagagggaaagcacacttgatagattataaataggtagaatacaactaaatcccaaatattaactaatgcattctaacactacccatatattgtatttgttgaaatggctaattgtccggtctttaacctcttaaacacttgagcgcctgagtttttgcctcgttactgttttaagtgttgtatttgtgccatcctgaacatttccacagacagtacatttattgtggttgttattgctgctgctgctgttgatgtgggggaatgttagttcagggtgacctcaaactcagatttctcctcctcctcctcctcctcctcctcctcctcctcctcctcctcctcctcctcctcctcctcctcctcctcttcttcttcttctgctccttcttcttcttcttcttcttcttcttcttcttcttcttcttcttcttcttcttcttcttcttcttcttcttcttcttcttcctcttttgttttttttgagacagggtttctttgtgtagccctggctccggctgtcctggaacttactctgtagaccaggctggcctcaaactcagaaatccccctgtctctgcctcccaagtgctgggattaaaagtgtgtgccaccactgcctggtgaatactggcaaagcaaatgatatcgccatttagctgatatcagagtttgacgtgtacaagtaacagtcttgttaagaagctatgggatgccagggcatcgggcatacttttctaaactattgttgaaatgtttctgaacatttttaaataatcatctgtaggtctctaaaatttatccctttccaaagggaattattacatggtgagacatatatgacttattatatgtcttgagattttacatggttttaagatgatgcaacccaagatttatattttactcaattctcataaatgtcatttaaaaaaaaataatctggagtcactaagtatatttggcattgttttaagtacttgtcacatgttgtattttcctggcatgtcttttaaccacatccccactaaaatatcttgattagcatattttaaaagtggaatcataacacactgtgacagtcggggatttggagatcctattggcatcatgagaattctgcctgggaagaattttcccaaggaatagtcaacaagggttgtccacaacctccaggattcagaaagtcacctcatcttactacgttgataagatgtatctactacagaattattagaaaagtatcctttacttattcatgcctaatattttgggatagtcagggcagctatggttttaaggatgagtagtcacacagcaatggagaacctgaagtttagaggagttctttcatcattcctgacttcttttgaattgaatgaacagttcacattttctgtagtcctgaaaacatagttttccctaaaaacatataaattttacttggttatatcttaattaaatcaatagttctcttctgaaaccaatgcagacatactgcttttgttctgacacccctcctgactttcttattattgttattcaagtttgggttttttttctgcacaagacaccaccaccaacaacaacaatctgttcatgctttcaaagatttattactactactattattattattattatttattattattattattattattattattattattattattattattgtataagtatgtgcacatgagtgaaggcactcacagaggcaatgccttggagctagacttaaagacctgacacggttgctgggaattgaacccaggtcctctggaggagcagtgcatgctcatagttgctggacctcctctccagcccctgttcatgtttcctttgcacatcttcccttccttacattcagagcctctgggaccaaacccagctaggactgtcagtctccagaatctataagtaggcagttaggtgtttgggggagaaaaaggaaagactggaatctaaggagatatgccttgctctcaacaccaactcatcttcaatgttggccctaggaactaaggactggggacatcctacatgagtattgtccctaaagcctaggtgtgtctttaagttatttgcctctactctctagtgggggtatgttatgggagtaaagagcaatgaactcttgtaagctactctcattaaatatgtctgggttgtatccttcctgctaggggtgtgtgtgtgtgtgtgtgtgtgtgtgtgtgtatgtgtgtgtgcatgaaattaacattatttagcaaacaatggcaatgatagttgaagttcttttgatttggttttaaatttattaattccattttaatattttcttacttgaaaaataccaagttgcagatcacactttttgaagttttgctgtccttgaactctaaaataactactataaacaactagctgtgtgtttgggtgtagacattgggcggtctgggaaatgtgtcttctcggttatttaagagcttcatcatgtactcacgctgtgtacaagtcctgtgatggtaacagcatttggtgccagcagtgtacagcaggggtcctggatcagcacgtatccccagctgccttctgatggtcaacactgatccacagtttccggaaggttgagacaatctgaccagttttttagaaaacactgctttcaaagttacacagcccaatactctttcagtaacttgtaagataatttctctcctgtctaaatgacatcaatttgttctttgttcaatatcaatttgttcaatatagccaatatgttcatatgtggctatggctatatgtgctttcaaaaaaagttttaaaggcatgtgtttaactcatatctctattaaatctgtgatccaggcatggtggcacaagcatacaaccctagaacttctgcaggaagatcaggagctagaggccagcctttgctatatagcaagttccaagtcagcctgggccacaggagacgctgactcaattaattaatcagttaattaattaattaaaaatagatctgtgatcctttcggctgcaagaaagatataaagatcaagacatagctgatgttgaggccactacatttccacttttggtcacctttctgaaagatgttcttcatttcttcccatatagtcagtatgacgtcattacagatgacttgagtcctaagcctcttctataaagaatggtcgcattgaaatatagccacaatgtcatcctatgtctgatgctgacatttgtatgtggggttttctgtgattattataatatagacaaatgacctcatgatgatccactagccacagtggcagatttgttcttttctataggcactacgaaaggaagtcataaaataatgcatacccatttgagaagaatgtaacacttcctaaaaactgttttccagtgaaggacacccatccccgagagtggagctgctacacaacatcgatcaggacttttttgatggcttgccatgtgagtacccagccattgccgccatgttaattgtttggtttctggttttagtagatactgtaactctagccggaattgcaattatgacaaacgtttctccctgatacttgtgctagtaatctcatggtgacatcagtattcttcgacgtcagtaaactctggctctgccatttgctggctgtatggagcaaagcccacaagacccccgaggcccttttccaaaaccaatctcatgtcattgtctatgtcacctggaagttccagaacattttcccagagaattcaccatcaaacaaaccactgtccagctctggggttttgtggggcaccagagcatctgactggattggcaggatgctgacacacccaccgaacctcacagtgtgagcttcctaacagtcctacaatcattccgcttcattctgcccactgcctaccagagccttgaccattccttggggatgcggtgacgtcacctgcactcatgtgaggttcataccagctccctcccgcactgtactgccttggtaaactctctttacttcttagaccccactcttcaggcattcctgctcagagggttttcctgtctgtgtcacttgtcaccaagctccctttcacctctccttgtcatagtctcgtccagcattactgtcctgtttgccatctcaaagcatatggttggttataccatccctagactctaaatacctgtttcctgccttcctgcctctctgaagtttccagagcatcccagaagccatgacaaacagctgccccttccttagtgtcccttagtgcctctgaataacatcagtcacatcgtctagttgggcatgcacttctcactgacatgaaggcctgggtgaccctcatcagttagcatttgtcaagtgctcactgctcgttatttgattacagaggagacaattggaagagagattagatgcaattaaaaataggaaatttccaggaaaatgggtgaatctggaaattattatattaagcaaggcaacccagagtcatatgatggcatgttctctttcatatgcagatcctagcttttaatgtttatatgaatatatgtgagtatgggttctagggtataaaactggaaagaggaccgtgaaaggggaggaagggttatgaaagggggatgagaaccatgaaaggtgttaggtgagaggggaagagaggaatggacagaagaagcaaatgacgtttgaaaatgtcataggaaacctaatactaagtatgctagttttaaaaagctaaacactaccaccaccacacccaaccggatagattaaaggaaggaaaggaaaataccctggtaacaggcaagaaatgtttcttgtattggagtgaacttacactacaggtgtaagagtagggttagacacgggagagcaccagagtagtctagattggtgccgcgctgtccgctgagctataggtggccactgagtacttgaaatgaagctaatcatgggtggaggtggcagatctaggtataaaatgcatatccagctttgaggactagctgtgcatatgatgcatacgtgtcggaatggcagtactttgacttgttaagttgaacatattactgatgctttatctgtgttttttccctttcttaaagcatgactggtggaaacattttaattatgtatgtgacatgcattagagctgttggtcttgaaggattttgtagaaggtcctggggaataagcttgtcagctgtacagagactctgtggttagtctctgtgagcctacaatgagtcatataaccctgctccaggatgtccaaaatgtgtttctcatatagtggctgtggactgtcttcatcttcgaaatccttgcacaaaaacaaacaaaaccctttgatctttacactcatagtgtagattggctttagaagtgacaacctgggaccagattcttacgtggccatctggccatcgtagccctgtttgaagcaaggttcttatggtaaccatatatcccttttggctgtcctccctaaaaatactcctatcaaaataacaatataggcaagaggttagtaagggtgtggaagtcaggacagagaactccacccctctgttgtaaggatgtttacagtgtattgtttagtggatgtgccaagccccattattgtggtcgttaattcagggacactttttgtccttggttgtcctttgtgcctcctcctatagagaaacctactcaatgttgggacctaccaacttgggaccttacaacaacatagagccaactgtttcatatgagggaagtggtctctgttgtctgtgtctacagggggcttcatgcccacctcctcctcacacagagcaacactgcagattctttctgagtcactccaggctgctgtgagggaaacatcggaaaaaagaaaaagaaaatactgtctttagggcctgctgctttttaccatgaaaacacaaaactactttctttcctatgcagtgaggttttgggtggggggagttggggggtgggtatagggaaaaagtcaatctaggtctaagaaaatattaacttagagccaacccaagtctagtgtcttccagactggccattagacttaggagagagtaggcaaggattagcttagctaaccctgctggggtacacgtcttaatgagcagtcatgttgccataggcacagtcacaagagaatgaacagaaattaaacccttagaagctttgtaaatcacaggctagtttgtattaataggtggttttgttcttgctacaccctgttcgcctctctgagccctgtcctgtgcctctctgagccctgtcccatacacgtccttttccttttccaagtgtcacctcacatgaatgacatgaacaggccctgagtgtttcccagagagccctgccttctatggcccccccacatccccgcaaaagctggctcttagatttatcagttacaccttccaccctattttcagggtagagggaatatccagggcccttttgttaccaggaaaactggggttccctctccttaggctcttagtctcattaataaaaacagactcagacagaagctcagagaccattttattaaaattttgaaaggaaaacaatagggcactctagctgtaaattttccgcagctggtgaatggaggtagatggagcaaaacagagaggaaaagccatagcctctgagttaagtaaggtctgcgaaagctggcatgtttgaaagcagagggtggcagacatctgcctgacagaagagttggggttcagggcttcggagaatgggtgagaaagcagaagtccagggaacgcatgcttagacagggaaaacatgcctggacttttgaaaaaggggcacaggaaaagaaaggaaaattatactttttgagtttagaactccaaaagcaggcaagcttagggataaagatgtgcaagcgactgcctcggggaggggctctggggccgtgagtacatcagcatctcattagggggtaattattcctcccatctcctgagtgtgttactagatgcatcagctgtcctggggagtagatgctggccatgagagtgacaagcccagctggattaactcttaaagggaaagacagcatagtgcataatgttctcatctttgggcagcatcagaatgttaggtctccacttggccagagagaggtactccatccttttgactagaaggcctaagcggagaggcagttacaacattttcctttctagggttagcagaacagatgcggtccaaagccaaccatgagaaagaggtctatcctcggtggtctccaaggttactaatctctgcctgctcgacattccatactcgttcattatttattgaaggcgggctgaaatcggggaataaatctgaccacatgcacatccagaggtctgactccaaaactgtccatcaggagagattagggtctacctggaactcctgttatcgtcacacacagctttcagacagggtgctcactgagagcagttaagtgtggagcactcctgctttgtgtgccttgcctcaggacaggaccaaggacattcccctggagggcagactgcatacaaagcctagcatctcacgctttaccactatctttctagtagggtgacatagactcagtgtctttcccaggagtgagcagtagaagtaactagtgagagacttgaggaagtggcggtactgttcaggatgagctatgggaaagcctgggggtgtctgacaagttggggaaacagctatcatgctggatctgaatttagctctcatcgatccaaggactctcctgtgccagactccatgtttcgcagtaccatccagatcaaggaagaaccactatgctaacacagtttgcagttgccagactgatcttggctgttctgaggtgatagtgcccttaagctgaggatacatctcaccttggatgtcagttgtgatcaccagaattccagaataatccagttgtgtgatatatgcatatgaacttcacacacacatacacatatgctacagaagttagcacagcacctgccatgagggtccactctgtgagtggctttgtgtagggctgttagaaccaacctcacatagaaggcctcctgtctttgggcatcacaaagacatgtaacttctgctagcgacaatggtgggaacggggctcagttccctctcctccctcacgtggacattttctctggtacagctgccacatctgcttgaggtccaagacttatccagtctcaaatgtgtcctaatctgaatataaaatagcctggctggcagaaggtcactctacgcctgtgcctttgaaggttagaaaccaccctgtgtgtggctgtagctccctcttggctttcttcatgccaccatctaaacagcacctccctgacctgcctctgagaccacgaggccaggctcatgcaggcaaactgttgtgggccaaaccaaactctgtgaacagaactaaactttactccctaagttgtttctgtcaggtattgtcatagcaatagctctctcacgctctctctctctctctctctctctctctctctctctctctctctcccttttcccctcccccctcttctctctctccctctcctcctcctcctccttctccttgtccttgtccttccccttccccttccccttccccttccccttccccttccccttccccttccccttccccttccccttccccttccccttccccttccccttccccttccccttccccttccccttccccttctgttcttcttcttcttcttcttcttcttcttcttcttcttcttcttcttcttcttcttcttcttcttcttcttcttcttctttttctctctctctctttctctctctctctctctctctctctctctctctctctctctctctctctctgatggccagttttctgtattggtcatttttctgacatggtgaccatatcatctgctggaaacaactcaaggaaggaaatttacttcggacgggtttccatcagggaagagacagggatgattgaggagctgttcatggctggaacaagcttaataagagcccgtcagggacatttcagattcaaagtgtcctgctgatagctccagagttcaggcctgttcgtttctgtgggcttctgaggagacggtgtttttttattttgttttgtttttctgtttaatgcatcagaacataccatgtattaccctgatcaggctaacccacttcccatccagagacatacgctctgagtagattagacatcacctgtatagcttgctcaatgcctgagtgtgtgatgggatgcacactggtaggtgagtgtgtgatgggatgcacactggtaggtgagtgtgttaccatcaactcacttcaataagaatgaccctgacccaggccaggatgatttcacccattctggttagctaaggagacatcccatctttctgcagggcgtggtaggattatgtaggataacaaagttctggaggcacctgggtagtcaggctgttctccacgttttctaacccagatggggaaactgaggttttagttccctcagagctgttatacaatggagctagaacctggcccttccctgctcacacatttccaaccatacagactgcaggcttctctcatttcctttccttcactggtttgatgggaaaagagctacttcagcaacagtcacctcgcctcaatgacagcatgttgggatgtgctatgcttatgcacgaatggagtatggtatgtttatgtacacagggggtgtggtatgtttaagtgaggctgggagaaaggctctcatagtgacaccagccttgctggcttcacatgtcatctgactctggatggtgatggcttctgactacagagctgaccctgagcacgctgctcatgccttggaccattacactgaaggagcaaagggacgagtgctgggctgggcagtaccagctcgtgcgaggtatagaattttggacttgggtttaagtagcaactttgactcatttcttgagagcctggagcctgagatgagttcttccactcatctgttttgtcaccaataaactgaggacagttacagcactgtcctataaatagatccatctgccagaaatagcagttacactggggctgctagggtgggggggaagctgcaatgtctactgcacatattgctacagttcttaaagatgtttccattcatttgtttattcattcattcattcattcattcgttcattcgtttaatgtgtatgtgctctgctgcatgccaaaagagtacaacagttgcccttatagatagtcttcagcccctatgtggttgctgaactcaggacctctggaagagtagccagtgctctttaccactgaaccaactcaccagccctctacaattgtatactctagagacgagcttgcttcacttccatagtcaaaaataatgtgttgaggctgagtttggaaagctacccaaggttctgtggagatcatgctgtctgccgagctgtgtcaatgggccgggcagtgtggacctaggctctcagctgtcagccgcagacccccaaaccctgccgtctcagttgagttctttctttctgcaggggacttatttcacagctcatcctcaggctcacaggacacatgctcacagtatttgtcatctgcagtttgtcatacttctcttgccatgggttgctctcagtgccctccctcacagagcccgggaacactttatttttctccgcttgagtttccagtggctcatggacttcctcccccactctggggatctcggctgcttgtttggaagagtggctttcttgatgccttgagcagccccacagctgcttgtcctgtctcacgtgttccacacagcacatctcaggtgacatccatcaaacctgcagctaactctccatcatgacctggctttcctcctgcgaaaacacagaaaccaaaccaaaaccacagcacttgaaaaatgctaactaatcctcaccatgaatcttggctgcacaaggctaacaaatcccatggccccagttttatgtttggagaaatcagggcagttggcgtcagaagacagaggctgatggaaaggttggagctagccctgtctctgggagttaggctgtttgaccaagggccagatgctacaccaaattcccttctgaacaacaatataactcttctttaactccattgcacttcattgctatagcagaacagctgggtatgttgggtaatggggacagctgtggctaaaggaggtatgaacacttggcttatagttgtggagatttatttaagcatgacgctgacatctgctcaggtctggtgagatccccattggctgtgtcatgggatgggtggcatctagaagtgcatgtgtgagggagtgaccaggtggtgatcctgaaagccagcgagagccaagtatgtctttactgactgacagtcaagaggggtatcaatccccaaaagcgcaacactgaccaaccgtggctgaatggtcttgcactaaagccccaccacctctcaccttcctgagactttcagcatgtgaaccctcgggaacacactcagatcagccagcacagtcattacactcagctgtagtagacaaacctattcacgggcgctggggaagttagcagaaagaactctttggttcctggggatgggaaatattattctgttacttactctgttgtcctggatttatgaacaacatggagtggcctagaagctagccagaggaaataagaacatacaacaagcttaaataaattcaaataatggacaaaggcaactgtggtgagatattatgagctctgtttgacgaatggccagtttccacagcctctgacatcattgctgtagatgcaggtgggcctgctcctaaaggctgcctgctgagagagcagcctgctcttcacctgggtaggctgctggggagaggggatcaccacaggaagtgaaggcaggagcaagcctgctcagggtagagagaaagcctgtaagaagggttgggccagcctcagccagtgggacttaggccagcaggctgtgggagctacctgatggctcttaggcaagatatctatgagagtgggaggattgaaacacagggaagttcgaagttagcagtaaaaaccctattagaacactctccggccaccataaaataaaccttgcaaatatcttagtatggcttttataattttctctttctcttgattttattcattaatagacacatacaataaacacattcttccaggattcagatcagaactttgaagttaatttttaattcaagcctctatgggcattaattttaaaatccttttatagcaattttatgaatggttgcatagggttgtatcatatgaaatgagcctaccacttcaacataataaaaagctttccttccgtggcttgagtcctacatttttttaaggatattttctcacaaaaatatggttatggacaccatgatgatcagcactgattgtcaacttgaaacactgaagagacaagcctcttcccatttctggaagggattatctagaagcgagtgcaggtaggagggctcgccccacccaccatagcatggggagaattggtttatgggctggcatcctgaactgaatgaaaaggagaaagtgagctgagcaagtgtgcgaacacacacacacacacacacacacacattcatcagctgtacgcgtgggacccctgaggtcctcatagccagggagagcaccgaccctctcaggtgatggaaggcactcactcacactgtggtacacgcacttgcacgcatgtgcatgcacacacattaaataataagtagtaaataaatggctttgtgttgtaaatgtaaaattttcattttgtagaattcttcacttcacatttaagcattcatcagtattctagtttgacagaggtttaatcatttatacttggctttttataacagtatttgtactgtttatagatgtttaatcatttactcttggctcttcggtatagagaatgaagtcaaagcagatctgcagatagagaacaacagcagcgactggggcttgccagccagcagtggcagataaacacagtagttttccatcatccctccctgtctgagggccgcctccaagtgcattgattattttttaggtgccttgtgttttattactggtgtcagaccttccttttatgtctgaattttgttagctagctggaggtacacagtgagtttgctttttatttttttattttattttattttattttattttattttattttctagagttaggagttgctaatgttgcaagtcagggcattcctgacctaaccccagccctgctgctgccttttagacatttagcagatacttggttttatctggtcagtatcttgttaagccggttcggtcatttgtgtgcccgggagagaactgtctttgatgatgtagtttgttcccgtcttttcatccttatgactttctctgagtttcgcctttcccttcgtctcattgcatagttagcgttgataatggtgatgtcgtgtacgcttgcctctgtctcagtctcagagagaagatgttcaaactttacaccattacctaggaagtttgttgtttccagacagggtttctctgtgcggtcctgggttcaaatcacagcaccatataaacctgttataatgagacatacctgttacttgagcatgcagaggcaacaggagtgagttcccagcagtgggttccatagtaaagacccactcttaaaaacagcacaacacaacagaatagtaacaacagcaacaacaacaacaacaacaatgacaacaacttttaaaaactaacattttttcaaagtgtagggctgggcatgcagcccagtagagtatttgcctggtatgtgtgaagctctcagcttgatctccagcacagcataagcctggtgtggaggggtacacctgttatcacagtacttaagaggtcgaggcaggaggatcagaagttcagggtctttcctcaactacagcgcaagtttgaggactgcttgtacacagtaagaaagggtcgcaaaaaataataaattcaaagtactaaggcgtaagaaactgctggctctcccctttagtaaccctcagatacagtggtttctcacaggccatccctaatgttgccattgccaccaactgcttagaatggcacctttgtgcctttgctttccacgagtaatacttcaagactggcctattctgctggtttgttcagaggaaattgttaaggctttgttggtccactgcactgtcctggttctctattaacttcggctctttattctttacctccccctaaacgtttccagttacagcaagaacacttagctcaaggtctgctccctgaacagatatgtacacactcaatgccgcattgtgagctctgggcatggcacagcagggcgctaaggtgcccaggacccatttgccctgtgtgactggccacacggcagctacatgtttgccctctgtcagcccacagccaccactattcttgggacaaatgtcttttcaagtctttcacctactttataatgagatggattagttatggtttttttctggtgagttatatgggtccctttttaatttattttgttttattttatgtgcattggtattttgcctatatgcatgtctggagggtgttagattacctggaactggagttatggatagtggtgagctgccatgtacacgctgggaattgaacccaggtcctctagaagagcagcctctactcttaaccactgagccatctctccagctccttatatgggtttctaactctatagtttttgaagttcctttaactgctaactgtttaccacctatatgatttgcaagatgtttttcttattctgtaaatggctgttcccctcttgtgtgtcatttatacacacccacatacacactctgatccccacacacactcgcccatatccgcaaacatgcatatcaccttattttctgtttttgtgcaatgactaaactaaggcagatttacagggattgaagtgacgtccttttttaacaattcagcttccttgtgaagatgttttatggaacctccgttgactggtaggtgactcaccactagggcacaaagaacctgctcgtctggaagcagagctgacttgagcattcagtgccaagcagacaggccatcagccagagtgatgatccacaaatcagtcccctacaggcttaagtgcaggcagacctggctgggaggtgagtgccggaagtattccaccccacccagccacacgcagatacctcaccccagactcagaggcccaccttcctggataacttcatctatctggtaatacttgaagaccaagggcagaataagcaagattgccccacaggtcctgttgctgtcattcatggagaagaccctaatgatgggattgcttccactgcagattgaaatctcctgagcacacagtgaactgtaaagcagttacttcaacacttccaatctgactgaaaacacagcactatagaaacatgtagagatggactgccttgatctgcagttggtgcccctgaactaggtgaggtcaggcagcccctttgccactcatgctttggcctctctgcagcccgtctccttcccaggaggcagcacctttgatgggctgaaatgcttcctacggtgctgggcgaagaccgagactaagctgccttttgacttacacaagagaagagactacacaacagaaagttttcatatgtttcaacccaaccatttcggataaagatgatcccaagaccagctgctcaaggagtggttaggtataagatatgtgcattgcatatctgtatagaagaggtttcataccagccaaaagaagctacaaacaaggtcttaaactcatctcttttccacctctgtaccaaatgtccccactgcctgactaccaaaacatactccaccatgagcccagggccacatactgttcaagacctttgcccattttttttttaaaccacaggctgatttcttgctatggaggtgcagaaattttgtgaactttggagagtaacttcatctcagattcttgattgacaaatatctgtaacattttcaatgttttatatccaacttgtatttgtgtaaacacaaagctccaggcccaggactatgttgccgagcagcagagggtgtggaaagtgcagaagagccaggaaggtcttggagaactgagccagtagagcatgggcgcaggttccagagcattgcaggagcttaggcccagagcctgccgtgtccccttcagactgaagccttgctgcaggggtgcctgtccaaggagaaatggtagaagtgaaagaataccagggctgctcacatttctggaaaagccctggaaacttatttccaccatgtaggcccagccttacactcttgcctgaggccctagagccacagaagagatagaagaaggctttgagttgccgagggacggaagctcactgtgtggtaggttctggttctagccagagtgtaggagagacgacagccctgtcaggtgcctggcaggcagctgaccctgcacctcagacttcaggaccttctccctggtttgtatttacacagatacaagttggatataaaacattgaaaatgctgcagatatttgtcaatcaagaatctggggtgaagttactctccaaaactcacaagaacacctgcacctccataacaagaaatcagtctgtggtgtaaaaaaaaaaaaaaaaaatgggcaaaggtcttgaacagattttcctccttgaaagtatacatacaaatggccacagaaagaacatggccacttggcatctctaatcctgaaagaaatgcaaaccagaaccacaatgagccatcgcctctcctctgtaggatagctactagctaaagggtattaatgtattttataattcaatcatcagcatttttattatcattttaaatattttttacttcatgtcagatctgtgagttcttttaaaatgtgttttcaaacttgcaaatgaaaccaagtgtggtgacacatgcctgtttttctagcaggaagctgatgctgtgttgttaagagtttgaggttggactggggtgcacaagtgcctagccagccaggcatgcgtaggaagacacaacagagttgatactgtctgcctctgctcctctgtcgtgaataatttttgcttatgctgttcctctacctctaaattacatgttcattttctttcagtgaggagtgttttcatattttggcatgcttttgtatgcttcatggtattatctaatcagtgagtatagttgaatagtttttactttaaaatagtgtggataccttatctctgtaaacttgacagccttaccagtcagctttttttgtgacagagggcttgccataaacaacttgaagagagaaagagatcttagctcacaaaggcttcatcgcatggtcctctgtgcactcccacagacttttaaaccatgtgtcctgaggacagacattatcatctctcatactcacatatatacccaagcatctagacacaacgaatagctgttgtagacattaaaaatgagagggagggagaaagagaggggaggggaggtgtgtatggggggaagagccagaaatatacacgtgaaaagtatgacttataaagtacttgattgaaagagctaacaattctggtcaagtgagacacaagaaagcttaggtaggactttattgattatacatttacttgagatgaacacttatccaaacttagaatgatttaaataggcgattaaaactactcagactacttaaattcaagtcaagtctttgggtttatattttataaaaacttccaaaaataactcagtacttatcaaacctggcctcatactcaaaagaaaaatgaataataaaggagggaagccagcttgagccccaccttcctttatgatcttctgactgaataaagatttacttataatacaaatatattttcattttcagaaattgaggactacatttgagttgcttcttggacaagttagaatatatactgacttatgtgaataactatgttttaaaatgttagagatggaaaatgaagctagattcttccctttatctaatgtcagctgtatcttcaaatttatgaggtaatttttccacatatctccacaaataataaagagcagcatttgccctgcatttgagctcaaataaatgtacattcttttgaaatgaaaatattgacaatgagcacaaaattagaaaagaaagaaaagcaatgcatataaatcacgagactcttgggagggagtttaagcaaatctaagaactgcacttttcatgattgtacattttctctttaaaacaaatcactttcccaactctgcgtggcttgacaggtccaaggatgacatcagctctttcactatgcactatctgctttccttcagataactcaatggcacttcatcaagttttaatgattgagatgaattagaaaccaatgggggttgagtttaaattcccttaactgccatgcatcatgtattcctggccttagacctacttttgaacacccctgagaatttatattgcccatggttttctctggttctagaaatagaagtgaacaagtgaaggaacatacactccttaaagttctaatagtgtctgtcaaaatgtactaaattacatcactgtgcttcaggaatccatgccaatcatcttcttcccagtctctcttagcccaataagtataataaacttggcactgttgtttcatttcaggaaaatcacatatgttatctgtggtgtagtgtctttcattagtggacagatactgactcagtaaggtgacagtacaaagatcatataagaaattaggctgttattcaaaaagaaaagagcaagctgtgaactgcactaactactcttgcagcatctaagaacttgcctgtgactgtcaggcagtaattcctgtattctagacatctggtctaccactcagctcttctaccaatactgctcacttttgaatgtacatccaaatgtcctgcttttgttgattaacattagatcaaaattcagcatttctttttcttttcattaaagattgtgcatatggtggggggggggggtagagtatgtatgagtctaaggaggtcagagacaccatttgaatatattaatgtacatattctatttaagacataacctggatgagtctctggctcagtagtagagcatttgcctaacatgtacaggacccctaaattcaacccctgataccacctacaagaccttaaatctcataactgacttttgaagggtttataaatccttcccccaaattcttgtttaagttgactctatagcaatgtacattgtctttctggttatccaaatgccagaatgttttttcaatactagtgtactttggagtgtctggcaaaaacacaactcaggccagtcagcagaatgattttgaagtttgacttagatgcatagttctttgtcctgttttcctgatgtctatgctggctagttttatatcagcttgacacacagcagagttatctgaaaagagggaacctcaattgagaggatacctccacaagatctgcctgtaaggcattttctttattagtgatagatggggaagggtccacttcattgtgggtattgccatccctgggcatgtgatcctgggttctataagaaagtaggctgaataagccaggaggaacaagccagtaaacagccctatggcctctgcagcagctcctgccttcaggtttctgccctgtttgagttcctgtcctgacttccttcaatgatgaacaacaataggaaaatataaaacaaacacatcctttcctccccaacttgctttttgctcatggtgttttatcacagcagtagaaaccctaagttaatgtcctatggtgccaacattcaaaaagaaaacttaggctcttgggaaatgtcagtgagctgagtatctacctggaagaggttcccaaattgatagtaagggggttgtaggcttcttcccagagtctccctgggactgctttggcagtgggtctgacttcttcacagaaactcctctgatcttatagaagtgctgaggttgggtgcagacaaactcttatggactcccagaaagattgcatagaaaaagcaagtgctgcctctgtgtgcccaagagactgcccccagcttttgcctctataaaaggcatggcaggtcattctgtgcaacctttgcctgttgatctgtcattgtatctcagaagacaaagagcatcctcacccagctccatcgtaagagctcatcctgtctctgggaccagcgagcctgtctctgtatctcctgaaaaaataaaggcaacttcctgggatataagaagcaggtctcatcatttaaccacagtcagagggaaactgggagaattgattgttcctgtgttttttactcagagtgtttaaagattagtggcaaacattctggtccaataaaaagtaaaagtgttttctatttggcgtcagtttataaaaaataatagaggaatcaaatggaattagaatatacagaagtatataatggtctctgagtgtgagggaggtgtgaagacagttttcattatccttttgacctaattcactggatgtattttatttacaattaaacattagaaagaaagaacaaaggagaaaggaaacaaagcaatactgtgctcaggttggacaccactcctctcctctcccctcccctcctctcctctcccctcccctcccctcccctcccctctcctcccctcccctccccttcccttcccttccctcccctcccctcccctctcctctcctcccctcccccacccccataagtgtgggaactctgctcagagccttggggctggagttaatcgtttgatttctctacatagtatagatctgtaaactgcctcagtgacagtaataaattagagtgtcttgataaagaccaaactcatcaatttttccaaaatctgtatttgattaattctacaaaggtctaggtcaaagttattcctcaaagcttatcattttaacaaagaaacccaaggtttccaggtttgtcagaaaactcattatcgctgcacgatggcaaaaggtcacaaaatgcctccttccacaagacaaatttcttctgctcaacaacccattcccctagcagaaccaagaaaaacctctgacatttcagatccttttgcttcagggaaaataaatgttccccagatcgtggaggaaaatgacaaacaaattaatgaaaaacagatccgttcctacagtgtacccggctagggcagaccgcatacactcaaagtcaagcgctcactctcaggtcctgccacctctgcagagtgacagttcccacagtggcatcagcgctgtcctcacagaaagctgtacacataccacagcgctgcaaaatgaaagaaacatgcgtcagaaaaactccagtgtttaactgtggctggaactgtgaacttgtgagtacgggcattttgaaagtgactcagccccttctcacagtgcacacgcagaacttgacttaatttagcagtgctgttttcctacaccctaaaagttcctgcttttaattctgcatcatttgtacctctgaacacatgctttccccatatcttcagtttccactgattaactaattttaaccttgaggacatttcttccttccttttttcttccttccttccttccttccttccttccttccttcctttttttcttttgaaccaagcagtatggacaaagcccgagttccccatgaccccagctgggtgccagtgctaacgggtttaatttgccctttcagaatccttcagttactcatttaaacaatataggcatgtggaattgtatacatgtgtgctgcttttcccccatatacttggtttcatatgaaatgttttgctttgtttttgtttgccatatgccttagttcagtaagtagagattagtgactttctatgggggctgctttgcctctgggggagacttggtgacttctagaaagctttttggtagttacaaatgggtagagaccaaggatactgacaatcacaatgtatacatcagctccctaacagagcatcatctacatgaagtgtcaaggatgccaagaccgccgctgttaggatcttcctcctctgacctgcagcagagccagtggtccattcagccagtcatgcacaggatcatttggctgaatccttaagcatgtgggcctattccttttcaccacagctagccctcttcctgcatacctgtcttaatccattcctgctgctataacaaaataccacgggtcaaacacctcataaatatcagacatttattgttcacagttgtggaggccaagaagcccaaggtcaaggtatctgcagatgtagtgtctataatgggcttaatctccaagtcaaaaatggtttcccttggctgtgatgtcttaaggcaaatggggtcagaagggcaaaggtgaaaaagggaagtatctctcttcctcaggtctttttgtgagggcactaactaagcctgtccatcctattcatggtggaggaactaaatcattccaccttgtgaccctacctctcagtaccttgggggtcaagtttcaggaggccattccttttaaccacagcaacccctacaggctaccaagatctctgaatgtcctggctccatctcagaagccaccttgtacatttcccaaagctagtcaccagggtttccttcagcactcatcccccacttggccttgcccctgactgtccctccctcctctgtggtaccaggctgattcccagaatcatgctagactctgttactatggagattaactatggatgggtcctgctctgcagactatctggtctagcatcagggattgtgccaggattgcaaactgactgactgactgactgactgactgactgactgactgactgagatatagtattacagattgtagaggccagcaagggatgctttttcttcatggttcagaatttattacacattttatcttggtgactatttctcctgaaacacacgtttcaaacagtaaatcaacaagaaagctcctttctctccacttacagcccctgtattgtgtcacacacacactctctctactgagaacacacttggcctctgccaaggctgagagcttcctttgagagcagtccagcttgtgagcagctgaggggagggacaggtggtccttctacagctacaggtccttcccctgccctgactttcagcctcctttggatggtggtgccttgggctcctgtggcctctcactccttcaaggggactccaggagtagactgagataaaggtgctggctggccctcatctccctggatcaaggaaccttaagcatctaccaaaaatccaacagcaaaggaaatctcagctgcaaatccaatccaataaaccccttcagcttgcacttagtgttcactgtgcagggttgcgggagatagaaagataaatgggatgtcatccccaagaagccggagcccaccaggatgggggcatgtataaacagttacatagaatgcaaagcagaatgaagttaccactaaaaaaaaggcttgagcagagtagctgggggaggagggggcttagttataaagcagggacccagcagcacgcctgaaagccacttcccacctaaaaacaagaggcactttatgtggtagattgtcttcagtttaaacaacaggaaagtaggatttctgacaggagaaatgaaacaggaacacatctaggttctcgagagtcattctgcaaagcttcgtcacacggttggctagcctgggtagaaatgggagccaaccatctgagttcccgtcacacacatgggagagccacctcagatcttaggaaggcatctagctcagtctccactgctgaggccaagcagcccgtgctgtctagcaaagatgtattgattcatttctagtgtgtgtatagacacggaccttgatcacgtcaggtctaactgcaaagctcttcaagttctctgtctagacctgtctacgtttatccctctaatgcccatggggtcctggggccagaaagcttgtagctcagcacagaggccgttactggagaggaccaaggcttccttggatgaggaagcagatgggagggaggcgtggatacagacaggaaacgggtgcatgaagtaggtgggtgaataaatacaccagtcacaagctttctttcctcattcacgtttgctcaattaatgacctcacacacacacttttttttttctgtgttagaggcaaaacctagagcccttcacatattagggagacttgacctctgaataccaccaccacacacacataaccacacacacataaccacacacacacacacacacagagccagataattatatttcatccctctaggtagaattctagttgactgaacaagagtctggaaggcaggtaggatgtagttttagatgttccagagggtccctgcactcatgtcatatgtctatgtagcatatttccaggaattcatcttacaatgaagcccactacccatcccatggtctctagggcaacaggctgggcaagcccagggtctcccctgactaacaacaagctgctgatcagactgggctcatgtgaaagttctgcttctgaagctatataggtcactgacaaaaggcagtggctgaggccgtaggactgaagccctactctctactcggggacagtcaagaccttgcttcctgtcctctctggctccaacctccgcatcagaaaaccttcctgctatggaatctcatgtgtacaagctttcttacctccttgactcctgtcagccagagaaaactgtcctcagagactcctgggattagggtagacccttcaggtgatctccctactaagctcatggactagtcactgtattgtagaacacactttgcccctgacataatgcatcagtacagcaacactagaggccaatgccatgggaactatcttggaatctggctacccactgtcctggatgtgactctgtctgaccttgaaatgataccaggagattgaaagccagagagctgagactgcagatgggatgggagagatacaggagatgcctctgggaaccagagaaaagcttttgctggctgaatcagattactgagctaggaaagaaaagcttttcactagtgagcattccggttgagtagaatatcgaagcagcagggtccttgcctctttagctgttcctagatgccaaggcatcttgactggaaatgctatcctgacacagttttgacctgagaaatgtacatctctctaggaaataactctacatgaggcccaagtgcctgaagcagagaccgcagttagaaagaaggactcagaggctgtgtgactcagatctcagctccaagccacctgagaagttctccagagataatagctcctcaaatgtttcactttttcaggacacagactcctttctccatttccccaggtgtctttttgcttgtattcacaacatggtgtcacgggcttgtattgtgagcattcagtgaagttgtagaccttccttatcgaccctattgtcaggtctggacctgccaaggggctgaaatcagataaaaacttcaagagctgtctttggggaaatgtgtggggaggggaatcagttcgtgcagatgctttcctccgccttttccacaggctaccccaggctgctaactgttggacactgcctgccctccacctcacaggtgcagaaagcaggggtctgcttctgttttaaactacactgaaaacgggtgtgcttgctcttcccgatctggtcttcaccatgaggagaatagaaaagaatctcctaaacaaaaagcagggatggagtgcagtgaggggggggggaggaaagagggagggacggagggatggagggatggagggatggagggacgggaggtgcctaggcagggtgttagggctcagtttagctaaaaagcacttcctaatgtacaaatccaccactcaaaaaggaggaagagaaagattgggggacacagtttacctttccagcagccatgagactagaaaaaaattctttttaaaatatcactttaaaactgaatcacactaactctttttttttaattgggtattttatttgtttacatttcaaatgttatccccttttgcagttttcccctgcacaccccctatctcatctccccttaccctgcttctatgaggtgctccctcacccacccacccactcctgcctcacctgccctagcattcctctatactggaacatcaagccttcacaggaccaagggttcccccttctattgatgccagataaggccccttcagctccttcagtcctcaccctaactcttccatagggtccctgtgctcagtacaatggttagctgcaagcatccacatctgtaatggtcaggatctagtagagcctctcaggagacagctggatcagactcctgtctgcaagcacttcttggcatcagcaatagtgtctgtatgtggaatggatccccaagtgggacaatttttggatggcctttccttcagtctctgttccacattttgtccctgtatttcctttagacaggaacaattctgggttaaaactttggagatgggtggcccccatccctcaactgtagagccatgcctaacctctggatatggtctctataggttctccctcctctttgtggggtatttcagctaatggggtcctaggaggctcttgctttcctggcatctgggactttctgattgctacccccagttccccatcccccattgctatacacttctgttcaatttcctgaccctctgttcatctcctccatctcctcccatacctaattctgcccctctttttcctttccccttcctttcttcctcgaaagtgcttcccaccctctacttcccttgattttattgttccctcttctaagtaggactgaagcagctactttttggtcttccttcctcttgagcttcatgtggtctgtgagttgtatcatgggtattccatagtctttgcctactatccacttattagtgaatgcataccatgtgtgttcttttgtgactgagttacctcattcaggatgatattttctagatccatccatttgtctgagaatttcgtgaagtcattgtttttaatagctgaggaatactccattttgtaaatgtaccatattttctgtattcttttctctgttgaggcacatctgagttgcttccagcttctggctattataaatatggctgctatgaacatagtggaacatgtgtccttgttatatgttggagtatcttctaggtatatgccttgttatatgttggagtggtatagctgggtcctcagaaagtactatgtccagttttctgaggaaccgccagactgatttccagaatggttgtaccagcttgcaatcccaccagcaatggaggagtgttcctctttctccacatcctcaccagcatctgctctcacctgaatttctgatctcagccattctaactggtgtgaggtggaatctcagggtcattttgatttgcatttccctgatgactaaggatgttaaacatttctttaggtgcttctcgggcatttgatattcttcagttgagaattctctgcttagctctgttccccattttttttgatagggttacttggttctctggagtatctagtctgttagtctatgtctttttattggggagtttggagtttagtccattgatgttaacagatattaaggaatagtgattgttgcttcctgctattttttttgttagaggtggaattatgtttgtgtggcaatccttcttttggatttgttgaaagattaccttcttgctttttctagggtgtagtttccttctttgtatttgagttttccatctattatcctttgtagggctgaatttgtggagagattgtgtaaatttgtttttgtcatagaatatcttggtttctccatctatggtaattgaaaattttgctgggtatagtagctggactggcatttgtgttctcttagggtctctatgacttctgcccaggatcttctagctttcatagtctctagcgagaagtctggtgtaactctgataggtctgcttttatatgttacttgacctttttcccttaatgctttttaaattctttctttgttttgtgcatttgatgttttgattattatggaatgggaggaatttcttttctggtccagtctatttggagtcctgtaggcttcttgtatgtttatgggcatctctttctttaggttggggaagttttcttctataattttgttgaagttatttactggccctttaagctgagaatcttcactctcttctatacctattatccttaggttttggtcttctcattgtgtcctgggtttcctggatgttttgggttaggagctttttgcattttctttgattgttgtgtcaatgttttctatggtatcttctgcccctgagattctctcttctatctcttgtattctgttggtgatgctcatgtctatgactcctgatctctttcctaggttttctacttccagggttgtctccctttgtgatttctttattgtttttatttctatttttagatcctggatggttttgttcaactccttcacctgtttggttgtgttttcctgtaattctttaagggatttttgtgtttcctctttaagggcttctgtttacctgtgttctgtatttttttaagggagttatttatgtccttaaagtcctctatcatcatcatgaaatgtgatttcacatcagagtcttgcttttctgttgtgttgtgttgtgtgaaatattaaaaagaatggcagttcccaagcttcactcagcccctgaggtcttgacgaccagttcttaactcagggagactctctgactcagagctccaaaatctctccacccagcttgctcagttcccactgctgggtcactacagcatcagccccatgcttcaaaacccccaaggcctttgtggtgcacttcttacaaactcaccctttgccgctgtaccttcctctcttgaacccagtcaaaccactacgtgaaggaaaacaccacataaagttagttcagaaacaatggtaactcaatcactgggcgcaaagacttgaatcctaatcttgttagccatattaaatctaaaccctttggtagtaaatcctggcagatgcgccatataagccaggagacactagtagctacattttgccctctcgctatccccatccaaaaagccttcctgctttctctcttcctctgttcaacccagaagtgccacctacttgcccagtgattggttcctttattcattaggggaaggttcacaagaagtctctccagcgacagcagaattaacatcaaaatacagccatcaccagggccatccacaacagtgttgtgatatctagagctcgctgtggtggtagaactggattcttacgatgccaagtagccttggtttctgttgcttatattctcgcacttacctctcgacatctagctatctatggtgttagctggtctttgctgtctctgactgtggcttgtctctcctgtaagcctgtgtctcagcactcctgggagactagctctctctgggcagaatttgagagctgtggcacagggtcagctccaggcgcagatggaaactggaaggatcctgtcccaggttgctcctcggttcctgtgtcctgagggctcagggcagttcccttttgggcgaggtatttgagcagaagtggtggtcccatctgtactctcaggtatgtcagcactcctgtgggagaccagctctctcctggctggatatgggtatggagagctgtagcacagggtcaggtcaggggtgcagatggaaaaactcaccctaactcttaattttgtacattattttctttcattgattgatgaattttattattgttttgcttgagtttggggttttggggggttgttttttgttgttttgttttcttgtttttatgcctttttatatttaacaaatacttgttgcctccttgtgtctatgatactgtggtcctggaataccacataccatggtactcattctttaccatatataaaaattcccacagcaacatgtttaaaatccagcttccttagagcctccctataaatagctcaggatccctgagtgtgtagatctcacacacacacacacacacacacacacacacacacacaccactctgaagtgtagatgactcaggggtcttccctttgaggaaggttgtcataaaaagagtctaagccatagtttcttgtccaaagaacacatcactgctgcatcaggggctagacagtcaacatgtgtaagatgagttattaacatccatgatggatgccaaagagccaagcaataagcagagaaaccaaatgtgagaggaaagaaattgagggtcctcagaagattaaaacaaagggttccaactgagcctttaagaacgaaggaaagggtgagtgagggaggagttgggggacaagtggaggagcatgatcaaagtacattattttaaaagaacatagagcgggcattgagtgaggatgtatgcacagaggcaggtggccttgtgtggtcaagacagctcaacacagctcaggcagatggagtcagatggcttcactactgtgatgagctctgaactacaacctcattcttctttcttattaggttgctttccaagatatttcataaagtattgcacatggacatgtgaaaaaaaagattattcacctttgaaatacttggagtgcagtatgtgttctttgagcctgatttgtttaagtgtctgctttattgggaaattctggagacgccaatagcgtctgattataaagttcagacgcaaaggctttcattaaaagcatgctcccttgccttgcatattttccttcagaagtggcagccttgacagtgaagacttcactacaaatcagtgagcccaaggaaaatagtctcaaaatgtggggacagtttgtcagcctctgtgtgtggtgcccctgtctgttcacacactctgtcattacagctcattcttgttctttttttcaattgggtatttatttcttttacatttccaatgctatcccaaaagtcccccacacgctcccccacccactcccccacccacccactcccacttcttggccctggcgttcccctgtactgaggcagataaagtttgcacggccaatgggcctctctttccactgatggccaactaggccatcttctgattcatatgcagctagagacacagctcattcttcttacaggcatcatttaatcgtcgttattaaagagtgcttgatggctacaccacctctgctcagaactggttctttctcaccccaacattttgaaaattggaataaaattcctgaaaatattttttgtcttattaaaatggtaagaaattgagagacccctttcttgatagtattcataataaagacaaagaagtagaaagctataatgccacaggattctgttatttagagataaatcactgctgtggggttttatttggtgagttctgtgtggcttcaggaaaagaaagtccagagtttaatttgcattgtgtagaaaagctgttagtgaaaatatctgtacttattctgcctgtgcatagtcagtctataaactttttatcatcagcgattatactcatgtgtgcccagacaatttaagcattaaactctcccacttgtattttatgcatttaatggtgcatgtttgagtgtgtgtgtgtgtgtgagagagagagagagagagagagagagagagagagagagctgtctctgtgactttctgtaatttgaccagcatttgaggtgaattgaattatctgagcttgtatttcttctaagcccctcttcattgctgagtggctgttcctgatctattacatgcatttatttcacacacagatagctctgaaatcttcctcaacctggattcatatggtcactcactgaagattccattcgctctccctcctgtctgcctcactgtaaaaattcttcttctggcagatgctggggcctgcctttcttcctgtgagccagtgtacattgtcctgcattctcaggtccttgcagactctcaagcacctgcctattgttgcataaactctgacccacacttcagttgagattgcctgtgtgtgtgtgtgtgtgtgtgtgtgtgtgtgtgtgtgtatatatatatatatatatatatatatatatatatatgctcctgtttccatggtgacctgcctatggatcacatgtgtaggtgtccgtggcatggtctttcctcataagcatacaccaggatgtgactctttatacttgcttgaacagtcaaatggatgtgaatatacatctttgacagagcatgtggcaaaaacttggaatagtgaacccagtctggggtcagtcatttggcagagaggctctgacaccatggatgggtaatgggttttgatctgcactaatattttgcctttttccaatattaagtttctgctttcaatgtttttagggataaaatgtggtcagaattctgtgctcattgcttcatagaatatatagttcctgaggtcctctgtaattctgatgttgatacacccctaggagaattggcatgtcccattcgcacatctggtttgctttaggcaagggaactttctcgtgccagaatggcttttggtggatataggaaatctgctttatgttgagcctctgcaactcacagatgcaaatgtttaaaaacacggccatttcttcatctgaaacgtccccagtcactactttcgtccaaaaaaaaaaagaaaagaaagaaagaaaagaaaagaaaacccacaaaagaaacccaaaacccttacagtgttataaattcattgtacacaatccatatccactcatctcatggctcatatcagagcggacttaactgtttggtggcatcctagggtgcatgcccatgtcctggtctgctctgctaggttatgtcctcttggtggaatgtattattattctcctccatggggaaggacctcagacacatcgccatctgcttgggaagatgatgcagccccgttaaccctgaggtggtgctatgtggtggatgatatgtggtgacaggcctcttgccctccacctgcctccaaaagcaagaagcccctccaaactgctgtgcctgcagcgtcaacctttttttttctccaaatttgaaatttaacctaatgctttaggtcctgtattttctatgagaaacctaacttttcctgtattgctaattgttatattggattattttaaaagaaaacagaaaaaaattttatgtaggaaaaagtttaactatgttaacagcactaggtcaaagattcaagacctttgagagcttggaagaaggaatcacccccagtcatgttgtaatacaactgaacacagggctttgtggctgaagtagctaccccttcacccccaacccccacattcaactcacatattccctggtggctctaactgtttgcaaaaggaaggccttgcattatagtctcttaaaatgcatacaaaataaaaacttaaaagccattcggtgagaattagaggttcatggctgaaggtacagccttgaacgagaactgggtagttctctcgtgtccccagaaaatgagctcacatggcaaaaacagacaaagtctaccccctgccaaactccatgtcagcagaaatctggtctgctttcccaaatggaatgtggatttccaaactcgagacgatctctttccaaagcaaatgagaaacaaatacgtcctgggcactggctctgctttccatccagggcacagatttcccactgggttgttcctgtctgccatttcccaaccagcacgtggtcctgggacttaatagagtcaaaaagcccgtgctggatgtagataaaatctctctcactctgacttgccttactgctctgattcacagcacagcagcctcagtgtctgtcccgtgaaaacaaatgaccaaggttttgtggaaaagactagatctgggtcctgctgacatagtcagtgcaccagcctctgcccacaccaacagcctctgagtcctgtctgttgccagcagtcctaaggccagccaagatgggggggtgggggggggagagaacatgtaacctgagaagtgtatcagtgggtagtggggccgtggcaggcctgcaggcaagggaagtcctgtcccccctggacttatagctgggacactgatcactgcaggacctggagtgagatggcaagtatggacaggtgtcccaagtcacacagttgaggctccattctagtgttaggccaggccctgactctagcaacctcaggcaacctcagcatgacaggtacctttccgagctccccgtgaaaggtgggaactagttaaaaggcagccacctcatgcctccacctctgaccaggcctggcctttcccccatgtttgtcacgatgcctatggaaaacccttcagtgagcccttgatgctgatccaaggcaaagcgaacaccaggccatactgcagagcctctgcacaggctgggttctgcttagcactgtccccttgccctccctgagccatgcacccttggtttcagctagccttcatgctgatctttggcccctactgtatttttctgcatctctgtgtggtaaaactgtggtaaaagcccatttcagatgggctctccatgttgggccttcctgcccatcaccactctacctttcttggtagaattaaatactgattttacctcagcatttttgatgcatttagctcatcactatagggttatttgtccccagagacctggaggcctgttcatacctcttggtgtttctcacagcccactcctgggcacgtagcttatccgtcacaagcatctgtttttacagttcataccaagatggaagcctttgattcattatcattttggctctgattaattgaggaaataaaagcagggcctgtgggacatccagttgacatttattggtaacttctccacccattacaggcccagcaaaaaaagtcatcctagttccttgaagcatagcatagaggcccattctgaggcaggaagatccactgtactgagagctcacaatgaaattgatcccctggggccttcaaaagtatttggcttttggaagcgcctgtggctccagaggtcagtgggctgctttgatggaagttccctgttccagaggtataaatgcaatgcagattggatctcactccacccagtacaggatgcccctgccagcacactgggccctgcctaagacttgcctcctcatgaggtcacagacttcatcagaaaagtgcccgggggcctggggagatggctcagtctatatttgcccatgtaaacgtgaggacttgggcccaaatctctagcactcacgtaaaagttaggtcttacaggatggtctatggtccctgagctgataaagtggaaatgcgtagatccctggagctcactggctagcctattcagctaaagaggtgaactgcaggtacagtgagagactgggataaaaccaaaactataactgaagtcaattaaaacaacggcaacaagaccaacaatattgacctctgcctatgtacatacacacatttatctcttctctctctctctctctctctctctctctctctctctctctctctctgtcatacacacacacacacacacagatagaaatttgtgaagagtcagactttcaaacaccaactgaatgtgtaagagctaccagagacatgtctactcatctttgcatattaactcaattttaatgtgacaatcatactggattataagtgtgcttgttttaaaattctttgtcttttagacacgtgctgaaacagttacagaggaaatgatgtttgacagtgggtttgaaataatatagaaaggagagactgagaagtcaagaggaaacatagccacaggctggtgattgctagagctgagtttgggataatacttagtttttcatgatgtctgatatttttcataacaaggtgattttagcagaaaggctactttgttcctgggctctcctgtctgagattttctcttactgtgtctctttgctttgtccaagtttgctcatgaggacccttagtaggagaggccaaattactggcttccattgaaagaactttccttaagttctgtcaaataggtttgaaagtctttgaaatttggttccttcctccttcacatgggggtaaaggacagtacggagatctagacagaagactagaactctgaactgtgggctgaaatgtcccctttgagcgatggcttttaacctgtgggtcatgacccctttgggggaagctgaacagcctcttgtcacagtggtcacctaagaccatcagaaagcacagatatttacattatgattcataaaagcagaagattaccattatgaagtagcaacaaaaataattttatggttggagggtcaccacaacatgaggaattgaattaaagggttgcaacgttaagaaggctgagaatcacaacctttgaggttcatcccttgcctttctcctgtgaagagtagctgtcccctggctacagctggtagagaagtggaccatttaccatgcacctgggtcccaggggaactggcaaaggagcatttgcaaagaaaggacacttcagtagaactgaagctagttagaaacccacctgtgaagatgggctttctgatagagccagagacctctggccagccaggaccatgaaccaaggcaggctctgtgctgaattatttaacctcccaaatgtttccattgtgtctcctcctagaccagaggctctctagtccattagcatagcattttccaagagtggggtttcaccagccctctccttaaccaccagcataccccagcatgatacagatgggtgctctctgcttccccactgtcttcggccaccctcacctccctggccctgcacacaatatctgtggttatgagagagcagagagactatggaagcatcagcctggtgacagtgtaccctctggacacgagttggatggtggagttctcagctgtctctacctatgtcagctagccatctttgctgacttcctggataggctgctgtgactaccaagctgtagtcgtcacattccaaatgtcaccaggcagttaggatccaggaaagacagacgactgagagttcccaggcaagaccaggaggttgggatgtaccacagcaagtggcaggtagaagataaagaatagggtaagaagaatggctgactgggaacttagaagtaggcttgagtataacatggctacagggttttgaaatctggatgcataaaaagagactaaatgtgtcactactgtatccggcccaggaaaggaacctaatccagacactgtgtcctatgcctgggaagtttctgaggactccattccaggctgtgttagctgttggtgtgagcatgaggttcagtgtggtggctcataccataaccccaacccttgagaagccaaagtagaggggtcactataagattgatgccagcctgggctatgccctgagtcggatgttagcctcttctgctattaagcaaaattctgactaaaatcaccaaagaacaaaaactcacaaaatcaaagcaggcataagactgggatgtccatcaagggaccctggctcttgtcatttcgtattccctctagactgcttaatactgctaaaacaacagggcacgatggtaagacgagaatagcccagaggaaatatttttgacaataatggtgaagctcatctttcctctctgtcttatgtcagccatttgcttccttgataactattagcccattcagttctcacagcaccccctggaagtaggtgtcggcattcccagttttcagagaggaaagagagccataggcagggtaagttgtttatgttcccaggcaacccagctagaaagtagcaggatcacagctctgagtccaagctcacagagtcctctgtggtgttactgaccgtcagggttaaaggactggagaaatggctcagtatggaagagcagagggcccaagtggaaggccctgcactttgtgatggttcattctaggccttctcctgaccactgtgtgtagtagtcacgcacatggtgttcatacatacatacatacatacatacatacatacatgcaggcagaatactcacacacataaaatgttaaaatctaaaacaaaacaacaacagtaacaactggtttcttggggtgttctattcctgaggtgattctgcaacctctgtccaggtactgtctcaggcctgccgagccagccagctcctggagactcggcctgtgatttttaatctgtggccatcccagctcatcaaggcaatccccctatcagacgacagacatgctgaccatgagtgtatccccacatcgtcttcccttgttctgacttctcctcgtcagccagagagaacagaaaaaacccagctctgacaggaatgaactttgctctctctctctctctctctctctctctctctctctctcagcagcagctcctactgccatgggatgggggtggggtgcatgcatgcttttccttgagaggcagaagatgggagggagggaaagaactagaaatcagagaaacctagagcagcagagatggtcttcctgccagcctcgctgtgtcctcttcctgacaacctctctgtgttctctacctgtgcttgctcaacctttatcacaggcccgctgtcaaatcacaacgcagaggccggacagcaactcgagctgcctgtgggccttactggcgggatgattctcccacagagaagtggtgaacaggaaagtaaattagtatcagataaacctgatgcgattatcggattaggccgctgcttgttatgccggtcagcaaatgtgagagaaggctctggtgtttccaaaagcctcatggagatgtgctttctaaagctataccattgtcccaaggctctgcccagcacattctctctctctctctctctttctctctctttctctctctctcatgtaaaacatcttattgttctttaaaacggttcagggtttggttttaagtcagtccgcacatctttcatcagtctctctcacatgtcaactggcttcagccaccaatacgttatcaaattcattaagtccaaaagaaaaaaaaagctttaattttgagggtggggggtggggaatgtccagttctgagaacaattaacattagtcttctttaaaacaaaatgggggccatttcatgtcgctttatccacccctcttcccacacagaacagggatgtaactctctctggcaggcactgatacagatggacacctgcaggtgcataccctcacaggagcacacaatgtgcattcttttgaggaaacctatgaagaactccatgcctttaagaagcactgggtaacaggtatccatcccataatcagccaccaaacgcagacactattgcatatgccagcaagattttgctgaaaggaccctgatatagctgtctcctgtgaggctatgcagtgcctggcaaatacagaagtggatgctcacagtcacctattggatggatcacagggcccccaatggaggagctagagaaagtacccaaggagctaaagggttctgcaaccctataggtggaacaacaatatgaactaaccagtacccccagagctcatgtctctagctgcatatgtaacagaagatggcctagtcggccatcattgggaagagaggcaccttggtcttgcaaactttatatgccccagtacaggggaacgtcagggccaagaagtgggagtgggtgggtaggggagcagggcagggggagggtataggggactttcgggatagcatttgaaatgtaaatgaagaaaatatctaataaaaattgaaaaaaatatttacaaatgccagtggcttgtggaagagcagttattaaattgattttgtaaacatgaaacaaagaataaagcttccatccgaatgttgaagaagaagaagaagaagaagaagaagaagaagaagaagaagaagaagaagaagaagaagcagaagcagcagcagcagcagcagcagcagcagcactgggtgaattctcataggaccctccaagccaatgctaactgtctctggttggcaaatatttacaaggtgtgaactgagcactatgtaaggattcctgcctgagacagctgcagtcctcagctggccctgactctagactcatcagtggacctcagaaggcacacatgggacccccaacaggacctacctgttccctaggagggtgcagctctaagagctgctgttataagcagaaacagttgtggctgagagcaggcagaagggtcaattcttaccagccaccagtcaccattaaagtaagagccacccattcttgtctcctctccaggatccactcttggaaagcccttgggtaattacagcctccattgctgcctttggctgttagttttagtggattaattatctgccatgtcgagagatttcccctgatccctttgagatgttctttcccagcaacggctgatttagaatttcttgggaggtcagattggttgcgtggtttccatatcttcccatgttgtgtgaaagagagccgttcccagcctccctttctcctctggcttattctcactttctcaagagaagcctatgtgctaaccctggcaaccctcaaggacagggtgggtggtgaggaaaggaactcagctcctttgagtttctaattcaccctgagctgggtgaagcatgggctctctgtcttgggtccatctgcagcaagcgatgctaatccccagagcctctctgcccctagcatccctggttgactttgccagagcctaactaagctctgtgaagaaatcatctgagtgaaacccagttcctaactcagcagtgggcacagggtagttacttaatagatacggtctggaataacgagcaatgccctgcgttccatgggagaaggagctacagtctgtatagggctcacattgtctggaagggatttccactggataaatcaggaaagcagtcacaaactgacagacgatcagcaagcctcaatgatccttcctcccaccgtatccacctcccactgtgcttgggttacaggtataagtggtcccatgcacagctttttacatgggagctggagatttgaactcaggtccccatgagtgcacagaaccaccattagctatctccccaggctgagtttattttctttacatctgactctggctgcagtagcctacccctctgctctccccagttggcctcagcccctgtttacatcactatcaaatcctgctgtgacttcagaactcccactcagtttctatctagtgatgtttatcaaataggtagtgcctgataaagggatttggtgggtacctccagagggtttttataatattgtgttagctgcaaataaagtgtgaggattaagaaagatactaacaagggagaaatgggggaggtggggctggggaggaggaattctgcaactcagaagagccctgctgtgacaagactggacagttgaccttttgttaccttagcgcggcctctgggtcatttacatgtcacagcattagttcttcatacaccttcatgcattgtgtgtcccattagcatcttcaatcttcatccacgggtgtgtgttttaagattataaagattcagtcatgtttgaacactggagttatctctgggcctgcaaaagtgctcaatttggttggcctcggtgggtggggaaggaatagtgcatgagattttagtccacttcccagccttcctctttgccaacttgttgttgttgttgttgttgttgttgttgttgtttttctatgtgaatattctaaagctttgtgtaaggccttgtagacctctccctcacccctctcagtgcttcgtgcagaatgcatacatagcacaccgccgggcaaagcagtcatggacccagctgtggtcggatctttctgagaaaggcacatacatggagtgaaagtagagtgcttgtcataaaagactagcaggggctggggtgacttggccaaaaatgcacctgtgccaaggtgatttgatcagaggcctagagagggagttacccaggcaaagtgttgtagagtaagttccctgggtagacagatggaaagatgcaaagatgcaaagacaccagcactggaggaagatcaggctgggccagcagagctcagaacagctggagtgtgtcaagcactaaaaaaaaaaaaaaaaaaaaagccccgtgcaactgtgtcagaacacagtccaagaccggagcagtgtgagaatcaagtgcttgtgagagaactccaagaaaacaaggcaagagtctcgaggcctcagtttcttcacaacatgtgttgggctgtgtttctgtgctcctcccaggtgtagcaggtaggagtgagtttacctcagctgttgctattcggatgcctctgtggaaatgtggtttggccatgtgtgccctgtccttgtgattgcctcttaatcctcagagtataaattgtctgatgctctgaataaacttggctactgcctgagattttagtccacttcattttaaggctctgccccacccccaggttcacattcccaaccagaccagtaagtagaattgaagcattcccagcaaaggccgtagtatgagatgagatgacccagggtaagtggatgggttaagacaatgctgcagactgaaaagggcccagtgtgtgggagctaagaccggatacgtatttgtttccctttcttagacagtgtgagatggggcctcttccaagcagtgctttggagaccacagttctttcctctgtgcatctatgagctgccaaagctgtgtgtttgtctatacggaggatacaggagcacgttctggcccacagggcactcccatcttatactgcccagcatgcagagaagaacagaagtgctattggagtggtcctttggaggagatggagcaggtgacacaggcctgatgggccatgtcacagttccattcatagagtaccaagtgaggctgcatgagtgaacccacctggtagcatggcccccattacaagatccccacacgctctgcttcagacctcttagttcctgttcaggctctgttggccgtctgcactgtcctctggctgtcagaatagaatcactggtctgggtggaaacacagcactccagttggactagatagtggtttaaacaagaatacccttatagcctcgtgtctcagcatgcttagtccccagttgatgactgtttgaaaggattaggaggtgttttgtgtggccttgttggaggaagtgtgttgctggaggtggactttgagggttcagaatcccacaccaggcctgttgtctccccctctgcctgctgtctacacatcaggatataaagctcttagctctgtcccagcacaatgcctggctgcacgccaccacacttccctgccgtggtggtcatggacgcaccctctgaaacagtaagcaagctcccagttaagtgttttcttctatgagagttgccttggtcatgctgtcccttcacagcaatagaacagtgactaagacagccaggctcaatcatttgggccaaggaccccctcctgggaagtgatgtcaagaaggcagagatggggtgatcagttccttagtgaggcagtgtggctgtacctttcttcttcctgtctctttctgaggtgtgttctcctgacctgggcactcccgtccttgcagtgttttgggcagcttactcttctaaaaccactcttccagctctgtgtctgatctccatgccaggcccagtggcctttccccttctccctccatctgccccctccagaaagctgctgaggctcagggcttacccgcccctgaggtctttcttttaatctctaataaaattgtccttgtgtttccatttgagtccgttcttcgatgctttgattagcaggactgagaaccccacagtggggcctggattgccctgtataactcccacactcagggctaggtcacctcagcacttgtctacaaggctctgagctaacacagatagctgtgatatagaccatcccttctggggcactgagtcctggctgccatctgtggccacattgtcacagtctcaagtcatctttggagcttagtcaatgaacagtggacacagagctgaatctttgaacctgcctttcatccgtgcttaaaaaaaaaaaagttactggcttccaatttttctttttctagttggaggaatcgacactgatccaacccatctgtttgtttgtttgctttggtgtttttgttttgttttgtttagacaggctttctctgtgtaacagctctgactgtcctgggactcactctagctttgaactcagagacccaccagtctctgcctcctgagtgctgggattaaaggcatgccaccacgcctggcccctttcttttcttctgagacaagacttttctatacacctgggttaaccacaaaacctcttgatgttccttcacacctcctgagtactaagattagccatgcatcaccatgccatccgtcacctgttctttccaggctgttcctagtctgtccctctccagcctgccagggtgcccaacctcccactcacccagatgtgcttcctgccacacaggaccacctctgcccaagtcacctccttccagtttgctgatcaaatcctcctgggagccctcacccaagtctcacctcctctggtagaaataagctgtcacaggaatagtaagttcaggaggacttattatgcaaagacttagataatgcaaacattataaatcacaccagcaggataaatcccttttttctggttaataaataaccgctgcacattaccagtcctttggcacccatccttccggttcactctaagcttcctggatacatatggtctccctggtacctagcacaacctcagagcaagaagaagaaagagagggagaaggaggcggagaattattaataatggttgtctgtcattcctgcccttgaacagcagaggtactaaaaaaaatttttttatttgctattttaccatgcaatcccttgtaaaatgcactgccgtgggcagttcggggaggagcgccttttcaaccccaaagggaggccttgagcgcgtggggagggaagcagagatctgtgcagcttcctgcctgcctgtgggcttttgccaattcaggaagtgacttctgagggtttcatagagtgttcagcgataaatattctgaccttcatattcacaatccttttttctggcatgcaagaagttgcaagatctcagtgctttcgagagaatctaccttttggatttcctatgttatcaagatttatttttctttgtttggtctattgttgttttgaaataagaattttttttttgagataataggcatgaggcacaatgcccagtttaaaatgttgtttgtttgactttgtttcttgagacagtttcactatgtagccctggctgtcttggaactcactctgtagaccaggcaggccttgaactcagagtgattcacttgcctctgactcctgagtgctaggattaaatgtatgtatcaccatgcctgggttaagagatttttattgggggcagtggtggcgcatgcctttaatcccagcactcgggaggcagaggcaggtggatttctgagttcgaggccagcctggtctacagagtgagttccaggacagccagggctacacagagaaaccctgcctcgaaaaaccaaagagagagagagagagagagagagagagagagagattttaattgacataattgtccatatttatggggtagactattataatttgatacatggtcaaatcaggacagttagcatttctctatccttgatcattatcatttgtctgggttgggaaccctcagacctgtctctggtcattagaattgcagagtggattgctaaagaccatagttgatctctatggcatctccctttctctgattgtattttggtaaccaatagttaccagcctgtggctgtcatgtgacacactgcaccaaagccaagagaggccatcagaccaacagcccaattttcagagtccatcatgtcagtgggtttttgctcttcagtgactctggcaaaaaggagtccccaatgtggcacagccctccatgctgtttgtaaacctgcccggctctgtccaatggaaagctcaattccgtttagtttttctccctctcttaattggtttttccaaacgcaggttcagaagtaggagtttgatgagcacatgctcttgaatgcagggagttcccacccaccggtgtaagtgaaggtggcaggggtggcgagtctctcctacccgctttgataaagtgattattcaagagagggcaggaaggaagatcacacacacacacacacacacacacacacacacacacacaattacagaatggctcagccagcacaacctcagagtccaccctttggtaagtcctgttataagtatgtgtgaggtgcctcaaaactaacgtagtttaggtaactcaggattgggtatgtagaaagaagacagctcaggctatggggaaagaactgggtctttggaaaccttaagagaactatctgtgggaattcatagtcaaagcagacctatacttgagggacctcccagtcaggtgttctttgagctttcccaatttttcgttctctctgaatgagctgtagagcaatgtagcaatctttgcttgctgtctcaagcatgcttccagctttccttgtagaaagatcctgttctggatcttggttcctgtgagagcccaatagcttctcagaatagaaaactaccttcctttcaactgggccgctgcccagagccggggtgggcaagaacgagctgccttgctattggtgctcggacctctggcaagcagtacctgtgggcctccttgcagtgattacagggtttgggtgacactgggatctgggcagtggacagcagtactgtagggggctgttcttggaagaatgccgctcaccttcaggtttctacaccgaaattgtcacagctgtgggttcctgggatcgccatggatacgccgtccccagcaacccagtggccaggcccgcccgacagccatcatggctgaaccacaagcaaagccccctttccaaattaactattaaattagtatcatttcatccttgtccaaaaatgtgctcagagcccagacacgtctttcctgcttgctgggatataaactgtgccacgcaagaaaagcacggttctcagagaggcctttggatcttctgtaaggatctgtggttaggatttcactaaatgccatggtgggggttgggaagacttttctcctttcatcctaagccagaaaacagacgacccagcctgttctgtgctcatcatcttaatcataggctgagggtgaatatttttggttagtttcccttttttatacacacaatgcctatttatagccatttgttgttaggctccaccaaatacttggaaaccatgtatttagagagagacagaccaagattgtgaactggatgagaagccatcacactgcattagactggcccatgtgcggcaggatcagagtggaggctgtggctggcacacgaaggctgggccaggacagacggtctgcgagcacttaactagaagatgacaagacaagatgcatgctctctgtcttttaggcctgagctttgttgccatagctcattggcccccaagttcatgtttctaagggcattctgtgcaagaagccagtacaggctgggccagggaagttaaccctgccttgctcagccttcagagacgcttcctcctgcagcagaggggggcaaacacagagactcacagccaggcactgcacagagagtgagaggccctaaatgaatgtctccatcaaatccccccagggctcagggaagccagtggaaaaggaggcagaaaaagtggaggagccagagtgatggagacactaagaaagcaaggccctctaaagcaacagatctatgcacagagaaatttaagactgaaccagtgtacacagggcctgcttggcatccctgacccagaagcaatctccagctgataaccacttgcaaatggacttttagttttctcctggggagtctcactgtacaaacaaactactcttaagggtgggccacatgtccagcaggaggtgccagcaggaaatgaactcacagcctcttcggaggctccttgtctcacaatgtcagatgggattttccttttgttcttgttttaatcatatttttattttatttatatatattttaatttttttcttctctatttttacccttcaggtactttgcatatatattgtgacttccagtttagtgtttttatgggattccagagtgtgggagtaagtcagcttctgcatctatatctgtttcttgtgccttttctgggatttttttttctgtttgtttgttttgtcctagtccaatgcattaggttttgttttattttattgtatcttattccattgttacttgtttttatttactattaatttattatataatattttattattatttattttctaatgagagatggaaggggaagggaaactggaggagtagagggggaactggaagaatagggggaactggaggagcagagtggggatgggaggagtagagggggactggaagagtagagggggaactagagaagtaggggggaactggaggagtagaggggggaactggaggaatagaagggggactggaggagtaggggggactgaaggagtagcgaggggactggaggagtagggggaactggaggagtggggggggactggtggagtagagggaggattgaagaagtaggggggactgaaggagtaggggggactggaggagtaggggggaactggaggaggaggagtagggaactggaggagtagaaggagcagaaactataaagggaatatattatgtggggggaaaaatctcattttcaattttaggaattaaaaaaaagaaagaagcctaatataattactgtctccttgctgtcctgccaactaaatctcaagtctcctccctggatcctgtctgtgaccactctcctatcagtctagtttcccagttcactttcctctgtatctttccaccctggctctctgcagtaccccatcctttgcccctttatctgcccagcctatataattcttccactttagttacagcaggcagaagttggtctaaggcacctggatgaggagtctggaacaccacagaggggatgctcatgggagcctcctgatgcactgtcaaatacaaaggatttttctgacttttctacttctcctgggtcacaaggctaccaaggcctgtggtatgtgggcacaaaataaaggctagggagccagaaaagctgcagagggggtgggggtggggctaaagaagctgaaccttacttcacagcctaggccaaaactaagaggtaaataataaattccttttctgagaaggtggggttgtaagaaaggggcagtgagtgagtgaagcaggagggccggacgctggccacatgatccctggggcagtcctagggttagagctgtgaagaattccacggagagaggaatgtgagtaggtggtaagatcataaagtctaaaataccaggtgggatgttgagttccaatctggagaatgaaggaaaacattaaaagctgaacagagaaggctgaaaaagaaaaagaggaatctggagtgtcttagttagggtttcattgctgtgaacagacgctgtgacaaaggcaactcttagaaggacaacatttaatcagggctggcttacaggtcagggattcaatccattatcatcaaggcatggcagcatccaggcatgcatgcaggagtagctgagagttctacatctttatcttcaggcccttaggagatgactgactcccacatggttaggaggagggtcttaaggccatgaccatagtggcacacttcctctaacaaggccacatctccaaatggtgccactccctgggccaagcatattcaaactatcacatggggagatggcttagtggctaaagccttgacatggaatgaggaccaggatccccatcttcagtatcgagttaaaactggttgggcacgcctgttgcctaaatactagcactagggacatagactcctaggacaatgtggctggttactgctagctgagcagaaaggtacactctaggttcagagagagaaaagtagagagcactatagaacattgaaaggagatagttgatttcattttcaggcttccatatatacatgtgtgccctgcacacacacatgggatggaggggagggagggaggaagggagggagggagggagggagaaaaagagagagagagagagagagagagagagagagagagagagagagagagaaagaagagggggggggggggaggagaaggagggagaaggaggaagaagaagaggaagaagaagaaggaggaggaggaggaagaagaagaggaaggagaggagaaggagaagaagaaggaggagaaggaagaagaagaagaagaaggaggagggaggagaaagaaaaaagaaggaggaggaagaagaagaagaagaagaagaagaagaagaagaagaagaagaagaagaagaagaagaagaaaggaggaggaagaggaagaagaagaaaggaggaggaggaagaagaagaggaagaagaagaagaagaagaagaagaagaagaagaagaagaagaagaagaagaagaagaagaagaagaagaagaagaagaagaagaagaagaaaggaggaagaggaagaagaagaaaggaggaggaggaagaggaagaagaggaagaggaagaggaagaagaagaagaagaagaagaagaagaagaagaagaagaagaagaagaagaagaagaagaagaagaagaagatctttatatgcatcttttacttggagatggataaggagactctgaagggacaagacctttgcacaaaaagagatggtctgccaggactccaagttgccttttcccccatccacaaggtcttgctctgtagtccatgttaggcttaaactctcaatcctctggcctcagagtccaaggagctatgattacaggcatgtgctatcatgcctgatctttgggctttcataacctgccacatacatcttattgggagctcagcccaccctctgagccctcccagggaagtcatatctcctctgggttctccctggcaacaatgtttattgcatattttacaatgtggggtgtttgaaccaaagcatcctctcatttctggccacactctgacttcttttattctgaggattggtatgtagcagccacagtgatcaagataggttatctgctttatagataaatgaatgtatcaaataaatccttcaagatttagtacaaagtaaacatgcagtctacttcgggtaccaatggtgatggcttcatttttcagtgaggtccccagctgacagttcagcgatgcttgctttctgtttcatgcctgaccttgctcaattgacactcctggctagtgtcagacactacctgactattgaagttccccgtaatcaggctcctttctgagtagtcaccacgcacaatccaacagtgattaacagagctctgtctaggctgagcaagtcacaccagagttgtcttttcacaaggacttttaaaatatcaactacgaactgagtgagtaggtgtcagaggaactgactttgtaaactgaaaattatgaacttagattcatttgaaacacatcatatgaagtgtatatataaaaataatgagcattttgattccccccccccccgtaggtaataaatagcgtctgtaatatccttccccaccttttcctgattagcttcatgtctggcatattttccccgacactcctgtttcaagttctaaggatttcgccaaggacagacgggattctcaataagtagtgtgggtgtaacagaaaacttgcactaatctggtgaaagtctaggaaggaacaggctgtctaatggcagccaggctgcccctgctacgtgtttttacagtcagagcttgagctccacaccctgagcttcactctcgcctggtgtcctcacctgtaggggaaatggacaagacacaaggaggggctaggggagggaaggaagaactgttgctaagctctctgtgcttgcacaggggtccaggagtcttccccaccgcgtcctcctttcggggtactctcctcttgtctccccagcaccgaaacctctcctttcctgttctctctctgttcttccttctactccagtcttctgccttccagcgtaacactggacaggctgtgtgcacccatggcccctgcacaccaagttctcaccccttggcatggtctatgttgtaactggtgtggcagagatgatattctaaaggggcagactgttgaaacactagacccccaagaaatgggaatttccctaggagatctcatgctgtggggaggaaaggggacagacagaagggaactggggacttgcctccctgaaagggatttcacagttttaacaacctgtcagaccaccttacaggatgagattaaacccagatgctgatgggtcagctgtgggcaggaccacaccttgcttagatgagggtattcttgattctctatttgaacttgatctcacttcagaaccctgaaaaaggacttgaagagttgatgtccctccaccttgtccttcttcataatctggccacatcagacaaatctttttctgattcctgctttgacatggttcttttaattggcttattgggggcaagtgtctaggtctgaatttcattcacagactgggactcccaagttccaaaacaatgtggcctcactaaacacttgaccctctcacttgacttaaagcaaatgcaacgaagatccttgactctgttcaacttcttcctccagatttatacacgagttagagttgcccttctgaggtggtccctggtgtcattgggacagtgtgtgagactaaactggaaaaaaaaaaacagtacttgaaacaacagcaagcaagtggagagtccacagctgtgccctggacttggagtgagcctgggcagcaagccccccccccagtgagacaaagtccagtcgagtgtttaggcatttcaaacaacctcaagacagtcttgatgaagccattcaagtttccgtggaaactgtcagatgacagtttctgatgtctgagtgtacagagagatgacagggtctgccacagctcagcacacatatcccattcctaccccacacctcagcccacaaaaaaagtcataaaataaaagccatagcagtgcctgtggctccccagcgtcctgctagccgctgtttccttggggagcccttctctccccacctgcactaatcaacactctgctattctgagagtccctgctgcccacactcctggcaacactcactgttgttgcttacatgcaatggtctttctctgcctggctgtagccagcagcagcaggagctccagaaattctcttagggatgcataagcagtaggtacttacttagcatatgttaggtcccaggcaccattccgtgtgtgtgtgtgtgtgtgtgtgtgtgtgtgtgtgttgtgtgtgtgtgtgtgtgtgtgtgtgtgagagagagagagagagagagagagagagagagagagaccacacacacacacacacacacacacacacacacacacacaggtcaactgagtaaatgaggctctgtttctgagggggcaatggctgtatgtagttctatgctgttttctctctgttctcttcctttcctgtctgattcctaagcaatcaggaagacattcctccatagggatgtgtaaatagttaacaagcccaactgggatgatgttttgcaagagggtgaagaagaactccctaagacggtgattgcttggttctgaggacagtcactcataacaatgataagtgtagatatagtaaaaagagatttgtatttgaggaatggagaagtgttcctgaggtgcccacagaaggcagggaggaaacaatgggttggttaattaaaggaggcgcatataggaacgttacagttactgcagctggacatccaagggacaggctggttgagcaccatgtcctctgtgggactgtcctacagcagtaactatatgacatcagtacagcggatgctgataaagatggtaccgtcagatctctggggcaggaagagggccaggagcctaggtcagctcagactgggccagatgatagactatggctgagctagctgggctcacagagccagagttgggtgtcagagtgactgcaggccccagctggtcccagtctacaagaagaaggaaaaaccacttttctgcttcactctgtttttatttgggacctgatctgtgatatcggatataaaatcctatatcatgtgctgtagctccctataaaactttctaacaacatcttgttcccatggtaactggtttagaccacacagttggcatagggccggacaactggaaacaccttgactttaatagttgccaaccataggtcataggttaagagatgaagatgacttctttgagtttattggtgctgtccatgttccttgtccaatggcaactgcacggtgattcaaaagccacgcaaactgggtctccacactcagtggtgcctgagttcactatccatagactctgattctatctcatgttcatcctctgagctgggcagtctttttatacttgttttacaagcagagacaaaatagtgcaatgacttattatggtgacaaaaagcagtcgatgtaaaggcctctaatatataccctggtgtccgggtttgcttttagaactgcagggtggtgatgtagggtctgatccactaaagtcttcatagatctccacatccttgaagctagtgaagaggccatgtttctttttccatcattagaagttaaccagagttcctcagcaaagcatcagagtgggccagcaaagcatcagctcggggcagggtgcagggtggtggttgttctatagccagcttaatatttaagaaaccattgttaagaggaaaacttctatatttagatttgtaatgttttttttttaaacaaacaagacaacagtgttcatactcacatctggctgtagaaggctctgccatacagccagatgagaacataaccttagccaagcccacagtgactgggacatgaaccatgaacaccctgaagatttgatccacatgtgcagggagtctctatccagctgcagcctactccagctgtagggagtcaggtctggtgggagatgccatcttccagtcggagacctctcaccagccagcacaagaaggtgtttgaacttcacctagatttgggtcctttaaactttgaccaggaagaaatgatcagccactctaatggttaacataagttaaacttcaatataaattgtgagagatatttaaagggctggagagatagcttaagggttaagaacactgactgttcttccaaaggacctggattcagttcccagcacccacatggcggctcatagctgtctctgactctaagcctagggggtctgatgtccacgtgtacatacacacacaagtacaacactcaggtacataaagtaagaataacttttaaaaggagatgtgagatccacataactagtagccagcctcctcccagcaagcaagcaggcctgacagaatttcaaatgagaagacacttggacaaccagatttctgaaagagctaacgtttgctgaacataatcttggagaacattgcactgttagtaaatgagcacgcaccctttgcattgaagatggatccagcactcgggaggcagagggatctctgtgatttcgaggcttgggctacacagtgagttccagggtactactacgactctatctctaaaacaaacaaacaaacaaagcaaaaatggggaaatgataaagcaaatgggtcagtcggagaatgaaatatttaaactgttctttataaactatgaagtaattcaaagcaaggagattcattgggggtgggaacaggccagacaatagcacgggagagactaaacctcaaaataaattgtaaatttattctatccatacatatttttcttcaactctctcctgcttctggaccaggatggagcaagcacaggtattctccagtcccatatcaagggggaatctttgacacttctgctttgttttcctgggataataatcactttgcctgtctttcttcttttgctatttttctctaccttggtataagaagattaaataaataaataaataaatacctatactacttcatgacactcactaaaaacaattgccaagtattgctgcccagcttatagagccagtataggagttaagtagtttaacaaacagaaaacacttaaaatgtaataaaagattatcacacagtcatttgtacctcatatagtagacgtgaaccaaacaaacacgaaaatttagaaagacattttaatagcatcaaaagagagtaaaatacttaacaaagatataaagctgagtatattagcttggtggtagaatatgtattaggttaaaaaacatgtgttaggtaaatagccaggcatggtaacatatgcctttaatccaagcactcagggagtcagaattgggtagatttctgagtttaaggccagcttggtctacatagcaagctcctggctagctggggatgtatacacaatgagatcctgtctcaaaaaagtaaaattataaaatcagttccttgactgtaccagccacatttcatatgctccacagccacacgtggctggtgcctgaagcacagcccagcacagacacagcccactgccagcatcgtggagaggccccctggatactggagctttaaggacagactcagcccttggggcagttggcaagggtatcacaacagatgagtgcagagaagacagccttttgcactgaatgatgtttaaatagttaaaatccatatctgaaagaagaagaagaagaaggagaaggagaaggagaaggagaaggagaaggagaaggagaagaagaagaagaagaagaagaagaagaagaagaagaagaagaagaagaagaagaaaaggaagactcttgattcctacccttcttcatagacagaaatcacctcttcgtgggtttcaaaatccaacgtaagataaaggtgttggcttttcaccagtggactgtctccagtgatggcagtggaggaagcagccaaaccaggctggttcccgttgctacatatgatttaattaatcatgtaacagttttgtgggcatgacttatcagactaaacatttttgaattaaaaggagccagaagtaaaggtaaaatactgcatactctctgttcacagagagttcaaaagcaggcagagggcgtctttgctgtccagagataagtcacaggtcccttggagagaggagggagtgtctggaagcccagccacgggtccgacaccctggtgatgctcaacctcctctctgtcaggctgtgcatctgtgatctgcactattttccctacagggctgtagaagggtgtgtataagaactcctttctttagcactgaaaaaatggttcttgttgaataaattcttcacaaagatgaagttctttcaagaatttttaggtggtacaggactcagaggaatggggatcatctgataggagagccaattgctgtgttggaaaagcatggaccttcaagtggtcagttctagacacagaccccagagaagctccattccttgtgtaagaagttggcagtagtactcacgtggggtaatcaataccagacacaaaatgaagtgggctgagaacatcaacagagaaacagattaacatgctgaggtatgttgtatagtgaatttaaacagtgaagaggcatacgtgcacttatataattacaaaactctagagagggaatgatagttatagcatgtgtataataacacatgtgtgtaaagtatgacacagggctgtgcatattcctcaacacacgcacatgggcctgcactttgaaatgtctgaggatgcctagaagctataggaacaacagcatgtggaacagacaactgatggcaacaacagacaacaaaggagacttcaacttgatcttgttgtccagtttcttttgttaaaaaagcagtgtggggctgggggtggctccttgggtaaagggcgcctgccgccaagccagacaacctcagttcaagcccctggatccacatgatggagggagagaaataactcaagctgttcactgatctccacatgccacggtgacacatgcacgcctgtgcacacatatgcacatacacaagcacacacatacacccacacgcacacaaacaaatttgtgtaaaataaataaaatgtaagagcagttttttgaaggaaatgtggccaactattaacatctgttcacatggtgaccgttctagggagttagtatcctttgacatgctctctgtgttcagtcactcaaaagcagagaaataaagttgagataatagtatcattcatcatttagtctagacgtgtcgtttaggtattctctgctcctgtttgttttcagaaaaacatgtatataaatgtaagtagtgcagcaatagcagctccctcccttctgtttatgttcaccaagtcatgcttgttttatttaatacccaaaatgtttgatattgaaatgtgccctttatacaaactcgtgagggagattcacggttttatccaagcctgtgcgccagccatgaacccccttcctgtgatgcacatctccacctgtctccatcactagaagcatccgtttgtgttacagccaaaatatttgcaagcaaagaagcaagaaattagccaggttttccttgtgggtgcctattaagactgaaaccgctgatgtgtgctggatcggtgcccagacttggaaagactggcaagggataggactttcaccttttccatggcctgcagaacctgtgccaaaccctgcatcaaatccagggagccctgaagctctgtagagcatggcacaacataccaagttttgttgtcctttgactggcctggtcttgaactcccatctgcctttcacctcctcggtggagtgtggacttccttgttttggtctgtgctctggcaggtgctggggtcttgactgtcttaggcaagggctctgcagctaagctctgcccccagccctgttttacttcattgtctttgagtctgcacttttacaggcataaccacacagcctggcatgcacttactaacctgtctacttgttcagtaaaacaaggggaccttctgaagtattcccaggacaactgccttgactacatttgaaaagttaagaaagaaatgtgaacttaaaacagactaaatagtattcagtgaggtccaaaagttgaagcttatagatatgtaaatatgtactcatggtcatgagtacacccatcccttgtcatcacgggtcagcaatgtcctcagctaaagggacctgtacagatgagagaagaagttagccagaaagaacagactgagtgtgctcagctgaaaccctttcctgggtctaagtgagagccagcgtgtgtcccagattcttgcacgcgctcaactggccaggaagaacgacgctgcaacaggatccttctgcacacatttattgggagagcattgattgcataggcgaaagaagaacaatgaacaaggaaaatgatgctgcttatatacccctccatgtgatgtgtcagctcctgattagctgctcactcattaccccactactacgccccgggatgggcagtgacttggcacgaatttactcttgcacctgcacacattacttgtttaccagttaggcacagcggaggctcatgatggcaattgctcacggctccccacaccagatgtttgcagtctgatcctcaccgtgtgctgtaagggagccctgagattgtccagttactatagctaagtgaaagccaagggccagccactcgcacagctctttctactgtgagccaaagccacattctctagaggcagtttcatcactagagaggtgataattaagctcagtctatctggctctggctctggctctttttttttttaagatttattaattgtgtttatatgagtatatgaatacactgtcactgtcttcagacacaccagaagaggacattggatctcattacagatggttgcgagccaccatgtggttgctgggaattgaactcaggacctctgtaaaaacagtcagtgctcttaactgctgagccatctctccagccctggctctggctcttaatgggttctaaacttgagaggaggatgaatattaataactgccccctcagaaacttgatcaactgctataagaccttaaaatgataaattaatataatccatgtgtcttagttaggctttcccttgctgtgaagagacaccccaaccaaggcaactgtataaaggaaagcatttcgttgaggctggcttacaggttcagaggttcagtcctttatcatggcagggagcttggcagtgtgcagtcaggcatggtgtaggaggagctgagagttctacatcttgatccaaaagcagcaggagactgtcttcctgggcagccaggaagaggctccctaattccactctggggaaagcttgggcattaggagacgttaaagcccaccccacagtgacacacttcctccaacaaggtcacacctcctgatagtggcaagcattcaaatgcttaagtctccggagcccaaacccattcaaaccaccactactttatatgctcaaacagtttctatacccatagttattctgttgaatagttaaaaacactgctcactaatttttacatttcatgaatggtttaaaaagaaatgcatctgtagtttttttgtactatgcttaacctctcctagcttgtcagagacttcaaaaaatgtgcattttataattttatatactatctgcaaaggtacaaccattcgcagaaaatgtatttcacttacacatttaagaggaaaaagaacacacatattcttgcacactcatgcacacacacacacgtgcgtgctcatgcacacacacccataccacacactcatgcttgtgcacacaaccgctgcccagctccgttcctgtagtagacactgctatgcacatggctctgcatgttggcgggaggcaatgattttaaggatggattagccttctaatctccttgggatttcctttatatttgtggtggtttatgactgacatctaatgtaactatactttgtgtttgtatttaataaaagattcgtttctgtggcaggacacacatttgtactctggtgttgaacaaaggctactgttctgcaagaagggtataaaatgttgatttataatgacacaggccaataacagcaatctaattcttccaaactatttcttcccaggtcctggcaagaacatgactccagcaaaggacgattcttttccgttagaacattctgcctttaacacgtctatccatgctgggatcagatacaaaaattggaaactcctcacgggccacccaggtagaatgcttcgctcccttcctgtggccaccagagtagggcagtgtcctcagcctgtcctctgggccttcattccctggactgtgtccatagaaagggaagtccttatcactggctacaccctcctcctcctccttgcctagccggctcctcaaggctccctgccaacccctcagtttgctcagacatctgaaatgtcaactagtccttcagatcttttacagtccctgcagatcttaaggaagcagctatctgcttgtggtttcatggccttcttttaagcctctgtctggtccatattacacaacttctgttgtctgcctaagtagacttcccaccaaacagaacagtgagagaacgctcaccaaaatgagagctgactcactttttttttgtaatatatctctgaagctgcagggtgggggagtggcttccgctgctcattctgaccgtcctccgagttgatatttgttgttgttgatgatgatgatgatgtcatctgtagtggggttaagaggagaaaatcccacttgggtgcttcataaacatatatggatttttagacatgtgtgactgtcaaacatagcacacccagccagctgtagatcttcaccaattctctggctggggagagtctgcttcccctcccccttccttagaaagggacagcttcactgttttgtaaatatgggatatttccacaggctctgatgcagtgtagcaatgcttagttcgtgagtgttcttggtgtttacaatgacagttcattgtttgggactgtcccatgcattgcgagagatcttagaattactgtgctgttgcttgatagcaggagtaccctcattgccccagccatcgtgacaactaacacccccatcctgcttccaccccacatatagtttttaatgtcccttgtaacgctataggatccgtatcatcatggcatggaaatcgtattctgaactcgacatcagaaggcacaggttttttgtttgtttcttgatgtacgaccatacccacaaagccaaggaagccttgtacccagattcctgaaattagaacccaccaacagtgccccccacacacacacacactaaagtttaatttctttaccaggctgtggttactggttcccgcctccgtctcagtccaacgtctctgagatacctccagtggacccaccaaccaagactctctggctttttgatatcaatcaggaccctgaagaaagacacgacgtgtcccgagagcacccccacatcgtccagaaccttctttcccgcctgcagtactaccatgaacattctgtgccttctcacttcccacccttggacccccgctgcgatcccaagagcactggtgtgtggagcccctggatgtagggctctggggagtaaggggggctggagcccatttctgggcaggctagacctcaggcccctactcccctggcttctcttctttatcatcccccaccctgtcacctggccctcatgctacataacccaccaaaggagtccaatttcaacccacagtacattctaaaagccagtaaaatctggaaggatcttgctgttggctggagttagtgtctggggccagggtggccgggttcatcctgcttcctaaactacagacgctgggaacttgacataggaagttatccctgagtcctggaggccaggacagctggctctttttgcttcacaagtcagctgttagaactccctctgctaataaccagctttattggcaagacacatttcttgtaacaaaggcagggagcagatgttgctagtggttctgttggctgtgagtgctccctgtctgtgagctcttactcgggctttccgcacccatgaccctaaccctaaccctaaccctaaccctaaccctaaccctaaccctaaccctagccctagccctagccctagccctagccctaacccatccgctcactcatcttcctgtggagcgcacagcccattgcagtaagccagcatggagacatgcctgtgccgtggttttggtttccatgataactaaatgtgtttttatctccacccccacccccacccactattgctcattctgtctagacttctgctacccagcttgtgtggctctgttcctgtcatgcctttggacttcactgtcctgtgcctgaggtctctctcccctctgcttcacccattctgagctttaggatagtcctaagccctgcccagaggaggtggactggtcattctgtgtccatgctaatgggagttgtgggtctgtggcatctgctaaggaggattattcacagttgcatggaatctgtcaagattgtggctatatctcccactatgccatggtctatgctgttttctcaagcagtggcaagaaaggccaggatagcacttcttcgccctgagcagtctcagaaaggaagtggccatggaatgttggcctcagtaaggcagaggagacaccatccatgtccctttcattctctgtttcactgccctgttctggggctctggattctgggcttggagaatgaggatacactatttgactgtcagccctttctcagaccctcatacatcttaccgatgtgagtccaccagattcgcagcagggtgtgtcaaacccagtggtacttctcattaacacctctgtctcattcacagtttatcaccaacatcagcaaccatgtctgcgacataatagatagccagtactttttaaaaatgaattaataaacaaagtaaacgagaaagagttacctggcatttactagtccagtgagctgactgtaagggcagaataaatatcctccagcccttccgattctgtcctcaagctgtcccctcccacctctgcgctagcgggagaatgatctgggcagtcaatgaatggcaggtctgtgatggcctctgcaggtagacaaaagagaattctgcttcccgggaagtctcctttgccagcaatctccatttccattcttcactgcacactaggaattaaaaccaccaaataatatgatatgcacagtcatcttcagttcagtagcagcatctcctggtcattaatattctgtattttattatggtaagagtattataagaaaatggtactatggctaatgacatcttttaccaacctttacccaacttggctgacatatagcctgccattaggacactttttactccaaagactgtgacagagtctgagtgacatgagtctgaatactcctcctgtgtcctcctgtagctataggtggactgacggtccctacttcataacacctacctgatcgttccttagtgttctcagaacagctgtcctcagttccagctgtgactgtaggcagtgtttggaatattagcataactaatggatttaagaagactttcagaaagtgattcttaaaaataactggaggttttgtctgataaaacaaatagaatggaatatgtctcagattatatctcattggattttcatgtttgatacaaaagtaaaagcttgataacctatttttagagatattaatgttagttctttccaattttgtttaaccttgaagattttatttaacttgtgaacttactcctttgttatgccatgattgttccagatttgaggaacaaaataaaataaaatctttctaaaacta

SEQ ID NO: 10 - DNA, 31160 bp, synthetic construct
  misc_feature 1..31160: note = Synthetic
  misc_feature 1..18823: note = Mouse Sequence
  misc_feature 8776..9187: note = Exon 2
  misc_feature 9033..9035: note = Start Codon
  misc_feature 9789..9929: note = Exon 3
  misc_feature 18824..18856: note = Lox71
  misc_feature 18857..24666: note = Inverted Mouse Sequence
  misc_feature 19282..20572: note = Exon 15
  misc_feature 20466..20468: note = Stop Codon
  misc_feature 20686..20786: note = Exon 14
  misc_feature 21663..21739: note = Exon 13
  misc_feature 21812..21937: note = Exon 12
  misc_feature 22046..22167: note = Exon 11
  misc_feature 22247..22459: note = Exon 10
  misc_feature 22762..22978: note = Exon 09
  misc_feature 23089..23268: note = Exon 08
  misc_feature 23342..23544: note = Exon 07
  misc_feature 23633..23728: note = Exon 06
  misc_feature 24028..24135: note = Exon 05
  misc_feature 24255..24340: note = Exon 04
  misc_feature 24667..24700: note = Lox66
  misc_feature 24707..24738: note = Rox
  misc_feature 24707..29416: note = Neo Self-Deleting Cassette
  misc_feature 29385..29416: note = Rox
  misc_feature 29423..29448: note = I_Ceu
  misc_feature 29449..29454: note = NheI
  source 1..31160: mol_type = other DNA
ctctgtgcccacccactgccaagagggacaggtctcaaaggtcagggcagtgtcccgggaaggagggcatcggctcctgggagcggccttaggacgcggggtggactctcaccatcgcacaggaagccagccagtccccagatgaagtccgagcagaggtggcagaaggtaggcttggtgagtgtcaccttgcgaaagctgtggccaggtgctgcggagccaatagctctgctagtccgctccggccctgaccccgggcgtgtgcggcccgagatgcccagcactggactgccggccgggctgccaagacgtggggaaccactgcccggccaggtccgggcaccgggctcggctgccgccgccatccacaacccgagcgccccagctccaagcgcacgataaagccaggtccgcggtgtagagagggccctcggcagagcccgctcccggcttccgactgcgctacctaacgcgcaggctcacgtgggcggggccagactggagagggcctcctgaggggcggtgccgtcctgccaaaggcggggcctctggactagacagaggggcatggtggcccaagaggatttgttctgacctccagcgccagattctccacacaggatactagatatatgaggcctttgctcgtataagcataggagaagctatatggaaacattcagtgggacttccacaagctcctttaacccctaattctacgcgcgcgcgcgcgcgcgcacacacacacacacacacaccctcacacacaccatggcaaaactttctcccactgtgttcccaggtctttgagtacctgcatgcaagggaaggccatccacagtaaccatagctttgtgttgtccagacaatgcctatgactttggacctaggagtcattctgcctctattgtcagcagccctcaagggccctgcttctataggccgactctgttttggagttggggaaacactactggaatggtgatccaaaaagttcctggcctctagcctattcccagtagccacagagtgcatcaagggaaggaaacagcgacgagagagctctgtgtgtatgaggacatcctggtctatctagtgagttctaggataactgaggctatgtagagaggctctgtcttttaaaaaaatatatatttattttattttatcagtatgattgatttgcttacattttgtctgtgcctggtgtcagaggaggtcagaatagaaaactggatttcctggaactggagttacagatgtttttgagctgccatgaaggtactagaaatagatctagggtcttctacaaaaaaacaaatgctcttaatctctgagccatctcttcagtttccttagtagtcttcttaacaagtcctggaagtttctagtacaatctaaactaggtctagaatgttttttgtctctgagacttactgtcaaataagctcaccctttcttatgcttcatgaactcttgctggctgctcaactctgctgatctggctcaaattcctctccaagctgactgattcagtatggcttctctctcggcctctgactttttgccctgcttgacctcaaactaactccagcaatctattctactcttctaactccttctcattctctggctcattctgtctttacctatgcctaaattgttctctctgtaaaactctcccagtaaaattgtttgcttgcttgcttgctcttcccctcttcctctcttcctctcccctctctcctgctctctcttaaatagctttcctttcctctctcttcttgtgagatgtgggcagtcctattctgtcaaatcattctctgatttaccactttgccatttaatcagacatcattttcaaacatgggtgcttccttctataaactaactttaccttcattgtttggaattaaagatgtgtgctaagggctaagccacatcataactaaaaaaagatttgttcagtaaataacacagtctcagggtttacagtttgattaaatatcttgcaatacttcccctcttatcactaataaggaaataacagctcaactgtagaataagctacttttgggtttcgctctgttacaaaagatccagatttgattcccaatcactcctccatcatctcctcctcctcctcctcctcctcctcctcctcctcctcctcctcctcctcctcctccttcttcttcctggaactcactttgtagaccaggctggcctcgaactcagaaatcctcctgcctctgcctcccaagtgctgggattaaaggtgcgccaccacctcccaacagcttaaaaccttctataactccagtttcaagattatcttctggcctttatggccaccaggcacacacatggaaagtgattctttagcttcttagtgagtgatgccattgtgaacctgtggtttttctagggttcctctgttcctcttcgctagtctttttgcagactatatctagtgtggtgtatgcccgtaacagctcagggtgctaagaaactgaccttctcccagatgctaaggcacatggtctttttcagctttcccaactcttggccattggcccagcatccactttcacgtcctggcaggttctagtcaggtagcctgcagccatgcagacagctgtctggaaggatgtacaagctacacttccttaggaaagaggcctgacatgccaagcaggctctggtaatcctagttttggttggaacagagcagggctgtgtgtcctaagccttgactggggttcctaagggataagtggttagggcaggaactatagaattgatggcctgcacgactcactggggctccatggtaggctctgctgtccgcctccttggggctctagaacaagaatgcccattttatgtgagtctgggctctgaagtggttggtcttcatatcagagatactccattttctgtctggaattagccaatttgggcatggtaggagtatatatttctaggatcaaagcctcaaatctagcacatagaaagtgagaaaatatagataatataagcaagatatatagaaagtagagattgcccatctgtagtggctattcttggttgtcaacttgacaatatttggaatgaactacaatccggaattggaaggctcaccagtgacccttatctggaggcttggagatccttatctggatcttggtttgaagatcttgagccatagtggctatggattccagaagattgaatctccgagtttaaggaacacacctttaatctgggctacgcctttcatctgggattaaaggtgtggtgggacacacctttaatctgggctacaccttctgctggagacaatataaggacattggaagaagggagtctagctcttgctcttgctcctttgcctgcttgctgtgtgagactgagtaactgctaaatccttggacttccattcacagctgtgactgaacaattgttgggaattgggctgccgaccatctaataaaggtataaactaaacatttttttgggggggagagcactcgagattctgtatgacagaatatgagcagggaaggtggtataggacagagcccactggaaaggaccagctgttgtaatctttttgtataccgtgtaaaggttgtctttgtatattcaaatattgatttctgtaccagcagagagctgagcactagccaactttgggactttggtattgttttttttttttttttaagattctatgtatttattctatgtatatgagtacactgttgctgtcttcagacacagcagaagagggcattggatcccattacagatgactgtgagccaccatgtggttgctgggaattaaactcacgacctttggaagagcagtaagtgctcttaactgctgagccatctctccagcccctggtattgttatttttaaggctcatcagcagtatcatattttgtaaacattcttcctccctagccttttgattggcttaataaagatatgacagccaatagctaaaacgggaattgagggagaaacttccaggctgagagagggtctctgggagaataatctggagaaggggggttgtggcagtgtggcatggaggaggtcctaagtatcagtacggggggtggggcataagtggccatgtggtagacatggactataataaatggattaattaaattagagctaccagggcatagtcttgctataatgcctaagctttaaaaaataataagtctctgtgtttttattcaaatgctggtaagtctaagaaagctcagcagtaccagcaaggcaggcaggctgcttacctcaggcttaagatgacaaaaagtgagttgagtgctgtagttccagctgtcagggctccatactccaacctcacatattaaaaatgtcagtgtgaacaccgaccactgctagtgggtgctcctccaggagctggttcctgatccttttggtgtaattttaacaatgctcagaacagcctacctcagccttgagaggacatccagctctctgggcttcccatagagtccgtttgtgatcacaccttttcagggaagagcctttcttactcaggagcaggtacagcattctatataacccatgcgtcttcagacacaaagtcgtgtgtcttggaatttatttcttgtactgggaacatctgggctaggagatggatgtcatcggttcctctttgaacatccctgcagattctggtcagaatgctgccagcagtctcccagcctccattgctttctacttcgtgaatgataagggactcaccaagcagtctgggatctagggcaggtgacaccttgggtacgatttttttgagtccactatagccccctttcctgtgtttcccttctgctgcctcctcgtgtaagcacactgttgcatctgagattcactggataatctaggataatctcacatcttaagattctaatgcaattatacctgcaaatccccttcatcacatacaacagtggagttaaccctgctaactacctttagtgactgtgttgctattaacatgcagtttaacataacataaatgtgttgctattaacatgcagtttagatacatttgtctttatgcccctatttgtctttatgcccctataagccatttctaccatcattgctttctgcagtcacaatacattagatttatgcagcttttataccccttattttcattctttctgtttcctctgcattcaactgaggatcactctctttctgcttgaagaacagcaggtaatatttccacagtgaaaaatgagtggcaactgctgccctcacaatttctctaaaatgtttctactcaacctttacttttcaaaaacatctgtgtgtttatgtattacatatagatatatttcctactgtgttatgcaggctggcctcaaactcctagcttaagaattcctttggcttcaatctcctcagtgtctgagaatcaaagcataggtcatagcccccacctggaaatgtctttgttgttgttgtttttctgtttttttgttttgttttgtttttgttaaacttaataagctaccaattacttatatgctatttatttatttatttatttatgtcaacatgacacaagctaaggtctttgggggaagaagaatcctcagttgggaaaataccttcatcaaattgtcctttaagggcatttttttgattagtgactgatgtgggagggtccaacccgttgtgggtggtgcatccctgtgcaggtgatcttggggagcaagccagtaagcagctttctaccacatcctctgcttcagttccttcctgcttccatgttcctgccttgagttccagccctgactcagggatgtactaagtgggaagtgtaagtcaaataaaccctttcttcccaagttgctcttttgttttgttcagcaaaagaaaacacactaagatgcttgctttcaggatttaggtttgtttttagtcttcaggttcagtactaatgctgaagctggcgctcgttttattgttcggctttttgaaagcaatgggtcatttccgtttgattgcttccagtatctttttgttgcttgtttcattttgtcttttccctcttggtctttatagctcccaataattttttttcagtgctggggggtctgcatatggccttgcacatactaggcaagaactgtaccactggactccatacccagctcatgactttttgagacaaggtcttgttatttagtctagtctgtcttaaaatatgattcttctgctttaggctgctgagtgctaagattatagacatgtacctccatgggctatttatagtactttttaattttttaatgtttattttgcctctatgtatgtctgtacaccacatgtgtgcagtgtctgtggaggccagaagaaggtgttgggtcccctggaactgtagttacaaatagttgtgggccactgtgcgaatgctgggctttgaaccgctggaaaagcagtcagtgctcataactgatgagatgtctctccagtccatacagtgatttttaaaaatatcggagagcttgattgcgtgcttgtgtgtgtgtgtgtgtgtgtgtgtgtgtgtgttcatggagatgagatcaacattgggtgtcttcttcaattgccctccatctttgagttctttaatattttgtttatttgttatggatgtgtaggagtgcttgagtaccatagcaagcatctaggggtcagaggacaacttacaggaaagagtcagttctctccttctaccatgtagattccagagattgaactcacgtcactaggcttggcagcaggtgttcatgtctgctccctcgcaagatccacctgctttttgagacaaggtctttcttttagtaaacccagagctctgagattctgctagactagctagccagcaagtccccagagagcctcgtgtttccctctccccagggctggggttactagtgttgctaccacgtccagcctttccactagggttcaaattcaggtcacttgactaactcagccacgttcttggcctcaaatttttaaaatttactttcagaaggttatcacggtggccccttcaaatgctatttctgctctactccccttcttattttcagctgcaaattcaattatactgttagaccttgtctcatgtctgtcctgtggtttctgttatttttttttttctgtcactgtggattgtcccccaaatctatcttccagttccttatttctgtcttcagataagtctaatttgtagctaatctaatccattaaggttctgccatctttatgatttacataccataaaacattccaatataaattatagtttttacattttctttaacattttttaaaaaagatttatttattgttctaagtacactgtagctgtcttcagacacaccagaagagggcgtcagatctcattactgatggttgtgagccaccatgtggttgctgggatttgaactcaggacctctggaagagcagtcagtgcccttaaccgccgagccatctcatcagcccttctttaacatttttatgattttacttttgaagattttcaagaacttgaaaatgtctcaatggttaagagaacctgctgttgttacaaagacccagattcaggtcatagacagtggctcacaaccgcttgtaactctagttccaggggatctgataccctcttctagtcttcatgagcaccaggcaggcacatgatacacatatatacattcaggcattcacaaatacacataaaatagaatataggcagctaggtatggtggcacatgcctttaattccagcacctagcagtggcgagagctctgagtgtgaagtcagcctggtctacagattgagttctaggacagccagagttacacagataaaccttgtctaaaaatccataataataataataataataataataataatgacaatgggactagacatggtagcccatgcctttagtttcagcgctcaggaggcagagacaggaagatgtctgtgagtttcaggctagactggtctatacagcaagtcccaagtgaatgaggacaacatattgagactctgcctacattagtcttcatacagaacagagcacccaaccaggtagtatctagttgctgtctatggacaccaaactttgtatttcagtcactacagaagcatcacatgggctcctgactttctgatccttgcacgaggttgtggcatagttttcatttctccacctaaaaaccttccttttaccagctttcctgaggacctcaggaactatgaacactagagaagggtttcttccttggtgtcaggagagatttgcatgagaaaggtgcttttcatgggttgtgaaactcgattgtttggaactgcagaggttaaaggcttgtgctaccaaaagtgacagctaattctgttccatcgttgctaatatcctgctcattgtgtgtgcacaattcaaatcttaaagatttgcactactgaccctgcctttcacagatgttcaggactgatattttggttgcccactacaaggagtcacttggatttcggaacgtctcatccgtccagaatgagagcagtcccatttcggaaaagctctgccaaagcaccttgactttctcccccaaatctaatccttggagcagtcccacagcgccatcttctgatacatttctccactttcaccccacgacactcagtagtgcctgatttgtttttcagagcacctacaggcctccagcgagaccgagacagccgcaagaataatggccgctctgagacacccaagcactgctaatgttggttccatttttggagcgcctgggacgcagcggaactcgccagcacggggcggcgcgtgactgggttcctttttgtcccggcctggcgagaggtcacgtggggcgttacgcagaggcggaacactgcgaccgccgcctaaaaagcttgctgtttaggggcacctggatatcccaaccatgcgacccccgcgtccctcctcagctatgctgacgttttttgctgcgttcttggccgcgcccttggcgctggctgagtcaccgtacctggtgcgtgtggacgcagcccgcccgctgaggcctctgttgcccttctggaggagcaccggcttctggtgaggcccaccacttatcaagtccaggagcgccccttgctctatcctctgggttccccccattacagctttgggctctctgcccatcactcctggacactcagaagcgaagagcaaacccctttagggcccaccttctcaagctagtcagtttctggattgtggcgtgggttttctagcttagtgggtccctcaaatgccagagcctctccctaagtggcccccaggaatcaggagcgcagtactcaggctataggttcatgattggtgctttggcagagcctaggagtctcccaaagtatcaagacctgtcccggtttatgagtgtgccccaagtttttctagaaatactcaaatccattttttatggcaggcagatgctctatttagaatacggttctgtgtcctgtgggagctcccctcaccctgcccccaagcaagactgtagaacattctggtgaatgggctattttatcgtacactctggagacacataattcatccacaagggtctaggcagttaggtaatacatgtacaaaatcgggtatgctgcaggcccctgtttaggacaaacacttcacttctttgtcctgtccctagccccccactgcctcacgaccaggctgaccagtacgaccttagttgggaccagcaactgaaccttgcctacataggtgccgtacctcacagtggcattgagcaggtccggatacactggctgctggatctcatcacagccaggtgggtgatgcggaagtgggtaccctgggagttgctggtcagagcttgttttacagagatgctgaggtggtggatctgaccttgtcggggccagctgtgggacacagtgctgggctgtgggggtcgcgggggtggggggggtcatggtagggcatagggctggggctgtgcttcctgttagagcatcctgttgggcagaagaggagaatgtctgcttggctatgccaaaggcagaccctggatggagcacaggtggtttcctcctgatgttttgttttttgtttttttttagaagtactgaatggggttagggtctactgtgtctggctttgtaccatacatataccacattgtggttaccagtataagctgtatagagacattgtgccccaaggtcaggttgaggttatataagtcacattgccttagaaagtgacactggactgtggctctggagcaggtggctgcctttgcaagggtccagtcaagatgagcacctggcatgaggaggcctttcagaaattcagacccttgaggcttggccatatatccagctcatatctggtacctggtggtacagggaatgggaaagtgtccttttggcatcttggaggtcatataatttgcaggattctgtttcagataagatgacaacatagtatatcaaactgggcactgtgtgggctgagggatcatgtgtgtgggtacagctaccctggttgaacaggcaccagggggcagcagtggactcagaggtagagagtctagatcactgaacccttggtttggaatccttgaatgtattaagggtgctgcactttcctttccttagttggagttccctggcttctccagggcaaaggtggtccaagggtatatctctaatgactttatcattcacaccactcctacagagcactggcttgtgaacacaggtgtgggctcttgagggccctgctagagggcagagtcagcagccagcagctcctcacggcgggcacatgcagcctccacagcactgtgcacactggggaatagcagctcattttcagctccctgttcttccccaaggaagcccccttttctcaacgtgtctctcaccgagggactgcagcaagccagaagcagggtgatgtccaaggccctgtagtctctgcggaggtctttcaatgtggccatgccagccacatccaggaacagcagtggtgcacagtcaatgaccactgtgtggaaaccaaatgccaggggtaccaccagcccagccccactgctcactgaacccagatccttgccatcgacaagactcctgttactgacacctacctccgggccctgatccttcctggtggctgagtgccctgcatccaaccctgtgagtctgtagagagaccgaaggaagaagtccttgttggcgtagtaaagtggacctgtgaaacggaacactcgcacctcaggtgggggcaggaggccctcaaattcagcagcatcctcatagaaggtggagtctccaattcgggcaagaagggcagcccgtggacgctgtgtacggcctgccaggctaagcagggagaagaacactccagctaatagtccagcctcggtgctgactagcacacaggtagctgcagtagccacccagaccagtgcatcggcagggcttagccgccaaagttgtgggagatccttcaccttgcgcagcgccccccgcaggctgacaacaatgatacaagctagcacacatcgctgcagatcatgaaacagtggagccagcaccagcagcaccagcaacaccacagcggcactgaccacactggacaactgggtctggcagccagtggctatcttcaccagagttttggacagagcagcactagtggcaaaacagtggaagaaggcaggcagcacattgcagcagcccacagctagcagctcttggttggcactgacagagtagccatgactacgggcaaacatttctgccaaggagatggagaaggctgagcccacgagggccagggacatggcatccagggccacacgccacattatcttagggtctggtacctgtggggccacaaaaccagtgggaatgttgccagccaccctcgagtcaaaccgtgtatggagctgtccaaaatgggacacaattgtggccaccacaataacaaataactctgtgggtattggcaccttcagacggtgtcggtagcgatctgagagttccttagctgccagcagcactcctaggcacagggcactggtgaccacatcacatatgttggcctgtcccacattctgcagcaagctcaaccatgtgtggaccaccatgcctaggccctggtgccgagggatctgcacacccagcatgtgttttgcctgagaagtcaagatggtcacagaagctcccatagcaaagccatcgagcagtggttgtgagagataggtagacacgaagcccagccggaggatacccatgaggacctgcagatgaagtacagtcagtttgataggttatgagccaggaaccaccatcaatatagaccgaggggtgcgggtcacagggatctacacttgcttatccctctgaatggactccttctgttttccacatatatcatgggccagaacagcggcgagctatgttctgttctatagatgttgcatgtgcatgctcacttctcatgctctcacacatgcagaaattggttttgtttcagaattagggttgtaggcatcgtgaggcagccccttcccccgtgtcttatgtgtagctccttccactaagctccctcccaggcagccacagaatagaagaatagaaggaacagagaagacaaggtcaacagaaaagagcaaggtgtggggagaccaggggaatgaatgcatctctactcccaggtcctgcctgggtcagtaagccaaggtggacattggggttgcagaccacactggccaggccagccctacatattcctccactctgtgccttcagcccctctggtacctaggcctgggctccacctctgcctttgctgtgctattttctctctgagccttagggatactttctctacatgcttccaggctttcctggtagtgagtggcaagcaccttcaggtgctctaagaaactgggacagccagcctacttgctgtgcagctaactctttacctgataaagcccggccatcagagtaagggcagtggcaacccgaatggcatagcagtcccgtctgcagtcctgtagcccaatgatcagtgttgtagctgagttgttgagggtgctgtcattgttcttgggccctagagaatcctgggaagggtcaaagccagccaactggagttctctgtccaccacctgacccaccatgagacacagcaggctgaagatgcccacattaacatggcgggaggtgcccatgaggaagtagatcaggttggcaaagaaggaagtgtagaggctatagatgggttgtaacccagccagcagtgagtaggctatggcctgtggcaccaggataatgccaatgaccaatcctgacatgacatcacctgctaggtattccttaaggcggtactggggcagccagtgtatggcaggaaacagaccctgcaccagagcctgagcacatggcatactgcaggtgcagctcttcttcagcctggccttcagtgtttccagcaagccctgggacacagggggctgccgtcggaccagtaccagtgtcccacccttctgttggggctcaggagaagcatccatcctgtcacaccaggctctttggcttatctgcaagggggaatgggcatggttaggtgtctaggccctcagagcccaggagccagcttcacagtgagtttttgtccacccaaacacagacatcagatatcagagcctgtcctactgacgtgaggttgtacttctgtgtgggtgaatataaggccttgagctccaagatgctagttttattgtgagaggtgtttatggcagcagcatgcctcagggagacatttgacctagcttcaaccccagcagtgctctgtggtctacttaactcagcccctatgtgaagtctgctgtctaaagcattctgaagatcacctacaagggctagactaggcctccaccagcccacatatgcccaagccacaatgacagtagaggcagatgcatcttgaacttgaactccaacctcttcccacccacccacccacccacccacccacccagtctggcaagggtctctgccagacacccaacttctacatgagttctcacaagccatcacctgttctcctgtgaacaccatggacctggaggttggcagaagaccttgtatattgtgtgtgctagggcccttggtctctgatagccttcttcatgagtttagaatgtgtctcaccaggcactagtgtgctgtggaaccagtgtgcccattatgccaagtgctgaatctcttctcagaggctcaagtacaccgaacaagcacactgcttcacagatgtccacctttggcctggctgtcctagccccttctgaccttgctgtggtactgaaaaattctcaggctgtgctgaccacgtgatggccttggtcctgtttacaggttccaaagtgcttgtttgtaatattaatcaaacactctctgttctcttgcaacccaggacatggtggtgactgttggagccaattgtgcttggcctgggtactgggatagcagcttccctggtagggtggttgtctagcaggcattctagctcttgagtaacattataaaaacaatgatacataagggtcattgaacactctgaggctcaccccaagtgtctaggggctcagatgtgtggaggaaggactataagtatcacctgccttgtatctgaacaatccccagagaaatggcaatctaggttcctatttctgcccattaagccaccttttctgggtcctgttgtatgggtacaagggacagttcttacctggggcacctggccggctctgaaggctttgcaatatccaggggcagcagtttgctggtgggctgatcctccaatcactctggcttaacagacagagagctggttggcaggcacctctgaggctgatctgtggagaatactccgctgggctcactgttaaattatttacccaaaagatagctgagtcatgggttttcccagtcaaatgaatgttacctgagctgctaatccggtgagctaatccagcaagttgtactataatcagaggctcacaagtaattacggttatgtgggcatgagataaactcccctttacagaggggtgggtgctccaggtgcagccgcttctgtcttgttatgaggaagaggaggtggagacaggagtggctgaggcaggttacttgagtgtgaggccccagaggaactgcgtgaaatcatgagattctggggtcaaatacagctgactccgcctccccagatgctggttatcttctttccaccatcatggagactgttctggctggagtaagctgaagctcaggccctgttccatgttcccgagggcagtgcatgcgcaaggctactgttgtatgtgtacatacttgtgagtgaacacacacctgtgttgtgcacagcctgtcggcatcaaaataggtgtgttcctcccttgcagcagggattctagattgccctcagcttcatcccccttccttccctcccctccttagtactgaccccctgtaatcctggtgaggtacttggcccccacgtacctctgcaggacatgagacttgccttgtaagaatagcttagagctaaatgtccctttaacattagcttaagtaaccagagatctcagacttgaggcgtgcccctaaattctgtaaggctggtcagaaccctcagatccacatcttgtagtgagcaatgagtttctcacattgtgtttaagagtaagtagttttgtgtaacggtcttgctgtcttctgtgggctcctgtattccgggtgctctcccatgatggaggtagttcttttcattatggctagaaggccagctagtctggtctgctgtctccataggccccagcacagtgggcagtttgctttggggctgcgcaaagtgaagctgtgttttactcctcttatccccaaaggtcttaagaatgggtttaggatcaacaattgtcttacagaaccatctgggaccctgagacttcattcttccaggtcaggggacaataagaattcagagttccttccagttcacaggttggacacttctttgggacattgacaggtcttgtccagttcctgccagccatgggcctgatcccagccccacttgtgggtgagatgggaatggaatgtgagtggagaggccagagtggaaagcctgactgacactgggctggatgctctatggtgtaggtactcctccacctttgctctcaggcaccccacctggatgctgtcctgtctctccaagaaggcctcctgttcctagaagagcctatttagggccccagggttttaacttgttctgtcctacctttgtagggctggacctcctctttcccttacaacaagctctgaagccaccgtttgcacagcagttggtaatggtggcttacaggagcagttacccagtgggtgtggcagagttagtcagaacatctcttgtgtcagataacaggctcctctagtggtctggggataactactggggtgtcatataatgataacttacccagttacccacataagggcctctgaggaatgtactgttgctacatctttgagaatggcagagctgaagttgtggaatgatgccctgtaaacacagaggtgctgggctgtaggacatggtgggagtattcaccttcatttcaaagcagaaagaaaacagtgtagggatggccccacccctttcttccaccctgggtgggagggattggacagacctctcctggttagtgtccacagcaaatggaaatgcagatgaagtcatgtcttccatagtttgcccctgctttacttttccctctacagctctgtgcactcagggtggcgctgcaatgggtatgatcaggctcactgccccaccccagtgtgctcaccttgcctcgctgctgcacacacagggcaggggtatgaggcccatacgtctgtttggtcctatgaagctcggtgattttttttttcttttatctctaagtccaccatttaaatactgcattctttatttgggaagaaaacatcatacccggcccaacagtggaaaatggtggggcggacaggctttaggaccagaccagaatttctgtgccttcctggagcttcagcaggttctcccgagagacaccaagcgtttccgcactacacgcaccacccccatcccgcttggcatcccgcatagtcaggcgtctgtagaccgcgttttcttgtctgcctcagccctcccaagcgttctgagtgcacggctacctccccgcccgctcaggcttcccctccccccaatcctccatgcgctcacccaggcactcaccagccgctgtggcctcatcctctaagctcacgcgctccgcctctagcttcggaggcttgggagttgctgaaggcagctatgaaagggcccttgtgcttctttgctggggctgcgcctagtctggctgtacggagaattgcctgccccagctgggctatggctcaggccactctgcaggggatggcagacttgcctacacctcgcctcaatgacgcgccccctccccactttaggactctaacaccaccaccctcccttcaaggcagcagagagggacaaaggactgctccctagatttcctgggtatgggaggccccgggaggtatggggtaggtgggtgggggtgtcaagcagatacctacctccatactgggtcccagtcttggaacatctctgatctgaaagacgggcctagaacatagcccttttgctgaggcctgcttcctttttttgtttttttgtttttttgttttttttttgttttttttttttttttttttgttttttggtttttttgagacagggtttctctgtatagccctggctgtcctggaagtcactttgtagaccaggctggcctcgaactcagaaatccgcctgcctctggcctcctgagtgcttggattaaaggcgtgcaccaccaccgcctggctgaggcctgcttccttgaagtgtgttctctgcctggtttgtgaagacagggagttgatgacagtttctgcctgggactttggaacaaggatttaatctttatccaaatgcttattaggctttatttatttgcaactggttttgaccattggatgggaaaggaaagagctgagcaggtctgtttgtagctctaggcagaggctccaatccaaaagcacagatggcaggctagacttgggggcagtagctaatgtgaccatgtacagtaagggggttgatgtgcctaggagctgctgcttcttatagaggttgttctatcacctacagtggagagtctgactaccatccctctccagacaaacccacgagctgtcttgcttgtctttagcaagctctcagaccctggcaagaccgactcttcgtacctgttggctggtgccttcaagttacctcagctgcagatttagccttcagggtggctcttcacccctttgctggagttgtaagccagagacagagctccaagcatcagtgtcctgaaatccaaacacttgccctacaactcacctcagatctggcaattgacagtatcctggcgtctcttcctttatgccctttcacctcaattagccactaccaggaccttttcagaatgttgtggctttgttttgtcagatgtctttaagatggcttgtcacctgtctcacgtctttccataccgttcgtatagcatacattatacgaagttatggaacatcagcctattaagatcagcccaggcttacaccttaaaggtagtttccaggtaataggtctgtttggggagattctagaaactttaggatgcagggctgagttaaacaaagcgggtcagtgaagaagtatttagcttaattctatccccactctacttcctgttccctttgaggtgaacagcctcccccctctactagatatcatcatcataatattctccacaaatgcatgggactaagcctcaggcacttcatgcttattgtagccatggatgacccaggagtcctcaactaccactcaagctgatagtaggctgtgatccacaggatgctggcttagaaggtagaatatcagagttacagtgacagggttatgttggcttccacccagatttcaaaggaagacttgggaggccaggtaatgtgtggcaagattggggtggctttatttcagtttattacaagctagagtcatttgggaagaaggaacctcaattgagaaaaatgccccaacaagattgacctatagataagcctgttttcttaaactagtgattgatgtgggagggtccagaccgttgtgggtgggggcccaccctttggctggtgatcccgggatgtgtaagatcatagtctgagtaagcagcacccctccatggcctctccatgacttcctgcctccaggtgcctgcctgactgccttcgatgatagactgtaatgtaggaatacaagtgaagtcaacgcttccctacccagatgcttctgctcattcatcgcggtttatcgaatcaataggaagcccaagacaccagcctaggagaaaggtcatggcggctggaaatggcaacaccacagacacagactgtccagcacatcacaggatcatgggccccgatgctgagaatggagctgcaggatttaacgtttgtcttgctatgctttggtcttgtttcacttaaatccttccctgtcatttctttttcctgttggaatgaagatgcttactctgtgcagtattgtatttcagaagtacataacttcatttttgatattacagaagctcaagaaactaaatttagactctgtgtgtgtgtgtgtgtgtgtgtgtgtgtgtgtaccaagcactctacttgatttttctaaaacagggtttcttactgaacctggagcttgcagtttcaggtagactggaaggccagggaaccctggcctgtctctgtcccttccaccaacactaggacaataggcatatattgccatgcccagcctatacatgagtgctagatatctgaacacaagtccctgggcctgcacagcaagcactttatctactgagccatctttccagtcccacatttaaactttttgaacagctgggcatggggaggaaggtgggcaaaggtcactccaactgggcctataaagtgcttagccacaaagactgaccctaagtctgaggtagagaaagacactttaaagggaaataggggaagaacaatagaagctgacagtcagctgcctagctaatggcagtctagctcatactggttgactccattcaccagtcagcacagattcacaagtcactaggagccagtggctctcatgaggcagggacatccaggtaagtcacagggtcggagaaggggcctggccgggcccagtaatccaatgctcgaactcggtaggagccagagaccacagctgtgtctgcagacacaaaagcatatgtcttctgaagttctcaaaccccagacccaacctacatcatactgtactgaggtccagcagtacaattgccaagactaaggttttagtcatacctgggctgaacacaaagaggttaaaagtagacggcctcctgttgattggggcatactcttcacctttctgggaaaactggatctcatatgtccacaggcacctgaggagggatgggtctgtactgaagctggtgctagctaaactctgaaggcctggatgggtgggatagggtggacccacaaccctatactcttcaggtcccttgctaacacatccaaggtccctgggcactctcaaaattgtgacaggacacactgagggaattggagactatcactgtaggtgatctccaactcagacacaagtgggtctgtgcaggtgtgtacagtgtgtatagaacacacgacagcagagggtctgtgcaggtgtgtacagtgtgtatagaacacatgacagcagagggtctgtgcaggtgtgtacagtgtgtatagaacacatgacagcagagggtctgtgcaggtgtgtacagtgtgtatagaacacacgacagcagagggtctgtgcaggtgtgtacagtgtgtatagaacacacgacagcagagggtctgtgcaggtgtgtacagtgtgtatagaacacacgacagcagagggtctgtgcaggtgtgtacagtgtgtatagaacacaaaacagcagagggtctgtgcaggtgtgtacagtgtgtatagaacacacgacagcagagggtctgtgcaggtgtgtacagtgtgtatagaacacatgacagcagagggtctgtgcaggtgtgtacagtgtgtatagaacacacgacagcagaggtctgtgcaggtgtgtacagtgtgtatagaacacgtgacagcagagggtgtgtgcaggtgtgtacagtgtgtatagaacacatgacagcagagggtctgtgcaggtgtgtacagtgtgtatagaacacatgacagcagagggagatgaatgattactaaggtgatgacatagaaaaggaggaccaccccactcacgcacttggagcccacacgctcatctgaccagaccaaaatcagctgtccatgtgtcaggggcagtgcacggagccggctgacctgtaaggagggagtagctatgaaggtctgagctagccagcctcacaggtagggtaggaggctgccacttgcctgcccaggtggcttcaaggggcgtgtgcatacatgcaccagcaggagtgatggcaccggaagcttccggtgtagggtcaggcggcccctagcaggaaaggggcgtggtgcctcagccacggggtcctggggataatgaagggcccgtggttggcaaatctcagtacctaagaaacccctccctccctccctccctccctccctccctccctccctccctacttgcccacaaacctccaccatgcgcatacgtcggaactgctctgcagaggggaagactggctggcccatgtgctgccacgcactgtaggggctgctgagttgattgtctaagtagagtactatgtagacaagatctgtggaaccagacaccatggtttgcctccctgggcccactacagctgggttcccaccttctttcagaaccccactcacccaagccaggaggtaccccacgcaggcgaagagtcacagggatactgtggttggggtgtgcgtgggtgtcatcactagtgtagatgaggactgtggtactccaggccgctgcggagccttcagggtgatgggtgctggccaggacacccactgtatgattgctgtccaacacagccccagcctttgagacctctgcccagagttgttctccatctataagccaagcagagggctgaggctgttggctctctcatacctagcatctggcttcctaccctaatatctagctcccaccatttgtatactgggagtctgttatactgttcagcccacaggatgggaggagatgaagaggtagaaatttggaaaaccaacctaagaaactcacacagcagctggaggaaatatgcttttgcaccttcccagcatgttccctcaatacaggatgtgccaggctttacatggtctttttcactttgtgactcagcacatacagaagcaaggtcattactcacccaacagggccatgagccccatgactgtgagtactggctttcgcagcaactgcacgtggggtgggtgagtattgttgacctggaatcgagcagtaagtgtgcgctgggagaaagggtacgggtggtagctcaggaaggcattgtcattgctgaggagcacatagcgcatggaggaactgctgttggcaaacagcaggttctggtgctgtgcaatgacctgtggatgtgaagacagttggaacctgtatcactggccactggtactgtccccacccccaccaaggaaggcctcctgaggttggaggaggcatgatggcaaggacccaccttcaccaccagggccgcataagtcacatcagctctccaaggttgtggcagggaccagcccaccagagggtctgcctcgtcattgtaaataggggtatccttgaactcagggaagagctgctggacctgctccacaactgccatctcctgctccaggatggcgatggagctacctgcaccctgagccagcacatacctcactcagtacaggctcagctcaaaggaggcagggaggggtgggagcaccacacaccttcttgtgcagggagatgtaatccagacgcacgcccacctcgccagtgaagaagttggttccattggcacagtgacccaggaggctccagcacattggtgaccttggcagggggtggaaggaatccccaggaccacccaacttcaaagtggggctggcaatgcgcagcccctcagagcaggcatcatagtaattcaggaagcctagggcaggagggtcttgagggtctgggattgtcctgcttccctctcatacagcccacccaacagggtctggaaaaacgctgcctaccttgtgtggtcatggacacgttgtcaaagtcatggtggtctggttcattccaagtctcaaagttccacttggaaacgtgtgtcagcccatacctacctgcagagggagctctactctcaggtttggggatggagcccacctggtatctcctaggacccatgaattgtgtgtgtgtgtggggggggggaggggttccacttgaatgggattacctggcttcaagcaagtaccctaccccacccctatcaggtgaatctctcacccatcaggcatctcaggctagggaatagtgatgtctttggcagagaagaccacgaggtggcctgggtgatcaaggaggagaacctcccggggacaacccactacagtccccaggatttcccccttctattcaccaatgtatctcctggccaagagagaaaccaggtccttccattcaaacacctgctgcttgtcatcaaagtccgtgaagtacccagaaggactgcccatgagctcaaatcctgaaacacacaagagtagttgtcccatcatacccaactatttcagttagtgctgagatagcaccaccctccaggacagagaatggcgggtggtgggagaacgctgggccattgctcaccagggagaagctggttctccatgagaaggtccaagaatgcatccaagtgggtgaagttgtacataagtccctgcccaggtgacttcctgtgaggggggggggaggtcagtcctggagagagcagcagtatttctccacactctggtttaaaactagggccacactcaagcatatgggggccccaagttctcagggagagccaggataccagatgggctttctttccctttggaaaagactagcattgtgaaagtctgacatgtttgagtatgtatgagtatgtgtacatagaaccctacactaagccttaaagaccctgaaaacttggggaaactatgaaagcttctatcacactcatcatggaatgtgaatgtgtgtgtctgaaaccttcaagatattcaagtagggctcttaccgttcgtataatgtatgctatacgaagttatctcgagtaactttaaataatgccaattatttaaagttagccagtagcagcacccacgtccaccttctgtctagtaatgtccaacacctccctcagtccaaacactgctctgcatccatgtggctcccatttatacctgaagcacttgatggggcctcaatgttttactagagcccacccccctgcaactctgagaccctctggatttgtctgtcagtgcctcactggggcgttggataatttcttaaaaggtcaagttccctcagcagcattctctgagcagtctgaagatgtgtgcttttcacagttcaaatccatgtggctgtttcacccacctgcctggccttgggttatctatcaggacctagcctagaagcaggtgtgtggcacttaacacctaagctgagtgactaactgaacactcaagtggatgccatctttgtcacttcttgactgtgacacaagcaactcctgatgccaaagccctgcccacccctctcatgcccatatttggacatggtacaggtcctcactggccatggtctgtgaggtcctggtcctctttgacttcataattcctaggggccactagtatctataagaggaagagggtgctggctcccaggccacagcccacaaaattccacctgctcacaggttggctggctcgacccaggtggtgtcccctgctctgagccagctcccggccaagccagcaccgccaccatgggaacccccaagaagaagaggaaggtgtccgagctgatcattagcggatcttcgggtggcttcttaaggaatatcggaaaggagtaccaagaagccgctgaaaactttatgcgatttatgaacgatcagggagcttacgcccctaatacgctccgggatctgcggctcgtgttccattcatgggctaggtggtgccacgccaggcagctcgcgtggtttcctatctcgcccgagatggcccgggaatacttcctccaattacatgatgctgacttggcctctaccaccatcgacaagcattacgcaatgctgaacatgctgctctcgcattgtggtctgcctccgctgtctgacgataagtctgtgtcccttgccatgcgacgaatcagacgggaggcagctaccgaaaagggggagcgaactgggcaggtaaatataaaatttttaagtgtataatgatgttaaactactgattctaattgtttgtgtattttaggccataccactgcgctgggacgatctcaagctattggacgtgcttctttcaagatccgaaagactggttgatctgcgcaaccgggcattcctgtttgttgcctacaacacgctgatgaggatgagcgagatctcaaggatcagagtgggcgatctggaccagaccggcgataccgtaaccctgcacatctcgcacacaaaaaccatcacaacagcggcaggactggacaaggtgctttctagaagaactactgctgttttgaacgattggctggacgtgtctggccttagggagcatcccgatgcggtgctgtttcctcccatccacagaagtaacaaagctaggatcaccactaccccccttacagctcctgctatggaaaagatcttctcagacgcgtgggtgttgctgaataagcgagatgctaccccaaataaaggtcggtacaggacctggaccggccacagtgcccgagttggggcagctatcgatatggccgagaaacaggtgtctatggtggagatcatgcaagaaggtacgtggaagaaacctgaaaccctgatgcggtatttgcggagaggcggtgtatctgtgggtgcaaattcacggctgatggattcctgaaccggtgtaatgatcataatcagccatatcacatctgtagaggttttacttgctttaaaaaacctcccacacctccccctgaacctgaaacataaaatgaatgcaattgttgttgttaacttgtttattgcagcttataatggttacaaataaagcaatagcatcacaaatttcacaaataaagcatttttttcactgcattctagttgtggtttgtccaaactcatcaatgtatcttatcatgtctggatccccatgcatggcctccgcgccgggttttggcgcctcccgcgggcgcccccctcctcacggcgagcgctgccacgtcagacgaagggcgcagcgagcgtcctgatccttccgcccggacgctcaggacagcggcccgctgctcataagactcggccttagaaccccagtatcagcagaaggacattttaggacgggacttgggtgactctagggcactggttttctttccagagagcggaacaggcgaggaaaagtagtcccttctcggcgattctgcggagggatctccgtggggcggtgaacgccgatgattatataaggacgcgccgggtgtggcacagctagttccgtcgcagccgggatttgggtcgcggttcttgtttgtggatcgctgtgatcgtcacttggtgagtagcgggctgctgggctggccggggctttcgtggccgccgggccgctcggtgggacggaagcgtgtggagagaccgccaagggctgtagtctgggtccgcgagcaaggttgccctgaactgggggttggggggagcgcagcaaaatggcggctgttcccgagtcttgaatggaagacgcttgtgaggcgggctgtgaggtcgttgaaacaaggtggggggcatggtgggcggcaagaacccaaggtcttgaggccttcgctaatgcgggaaagctcttattcgggtgagatgggctggggcaccatctggggaccctgacgtgaagtttgtcactgactggagaactcggtttgtcgtctgttgcgggggcggcagttatggcggtgccgttgggcagtgcacccgtacctttgggagcgcgcgccctcgtcgtgtcgtgacgtcacccgttctgttggcttataatgcagggtggggccacctgccggtaggtgtgcggtaggcttttctccgtcgcaggacgcagggttcgggcctagggtaggctctcctgaatcgacaggcgccggacctctggtgaggggagggataagtgaggcgtcagtttctttggtcggttttatgtacctatcttcttaagtagctgaagctccggttttgaactatgcgctcggggttggcgagtgtgttttgtgaagttttttaggcaccttttgaaatgtaatcatttgggtcaatatgtaattttcagtgttagactagtaaattgtccgctaaattctggccgtttttggcttttttgttagacgtgttgacaattaatcatcggcatagtatatcggcatagtataatacgacaaggtgaggaactaaaccatgggatcggccattgaacaagatggattgcacgcaggttctccggccgcttgggtggagaggctattcggctatgactgggcacaacagacaatcggctgctctgatgccgccgtgttccggctgtcagcgcaggggcgcccggttctttttgtcaagaccgacctgtccggtgccctgaatgaactgcaggacgaggcagcgcggctatcgtggctggccacgacgggcgttccttgcgcagctgtgctcgacgttgtcactgaagcgggaagggactggctgctattgggcgaagtgccggggcaggatctcctgtcatctcaccttgctcctgccgagaaagtatccatcatggctgatgcaatgcggcggctgcatacgcttgatccggctacctgcccattcgaccaccaagcgaaacatcgcatcgagcgagcacgtactcggatggaagccggtcttgtcgatcaggatgatctggacgaagagcatcaggggctcgcgccagccgaactgttcgccaggctcaaggcgcgcatgcccgacggcgatgatctcgtcgtgacccatggcgatgcctgcttgccgaatatcatggtggaaaatggccgcttttctggattcatcgactgtggccggctgggtgtggcggaccgctatcaggacatagcgttggctacccgtgatattgctgaagagcttggcggcgaatgggctgaccgcttcctcgtgctttacggtatcgccgctcccgattcgcagcgcatcgccttctatcgccttcttgacgagttcttctgaggggatccgctgtaagtctgcagaaattgatgatctattaaacaataaagatgtccactaaaatggaagtttttcctgtcatactttgttaagaagggtgagaacagagtacctacattttgaatggaaggattggagctacgggggtgggggtggggtgggattagataaatgcctgctctttactgaaggctctttactattgctttatgataatgtttcatagttggatatcataatttaaacaagcaaaaccaaattaagggccagctcattcctcccactcatgatctatagatctatagatctctcgtgggatcattgtttttctcttgattcccactttgtggttctaagtactgtggtttccaaatgtgtcagtttcatagcctgaagaacgagatcagcagcctctgttccacatacacttcattctcagtattgttttgccaagttctaattccatcagacctcgacctgcagccgctaggtaactttaaataatgccaattatttaaagttatgtacataactataacggtcctaaggtagcgagctagcgaagaaccctctctcctttagtacaaacccctggtgtgccccaccagagagcctgttggacacacgtgtccttaattcattctgcacatttttcttctctccatcagcacacagaagttcagcatacagaggtttgtgctgaaatgtaggcgtactcccaagctctccccagagtactatcacctactgtccaggaaatgagtctgagtgcagtgctcatatacactgcatggctacatccaaagtcagagttcctctgccctcatgcctcttgaagtgaacgaaatgtgatgaccttctgcagggtgttttttagtcctctgtggaccctaggctggccttggcatcttggctcacctgtcccagagttactactattaagattacaggtgtgtaccaccatgcctgccaattacctctcactttaaataaaatatgacatttcccactaccatgagatcacccacaacaggcttctctggagaatcctgagcttttcagagcttgtctcccaccccttggaaatatgttttactaagccctctgaggcatgtaacttcttgcctaccaagccagtgagcatgaccagcaggttgcattaattttgggagagtgatatcatcaaggcaaacttgaggtgtgctgacagccattatgggaaaagaagactgctcttgatgagacaaagagcactttacagtggagaagctggtgtgtcaggcagccaggcctcagatatagtgggtgttgccctggttatgcatgtaatacccggggggtggggggtggttatgaggatctggagagagacctcctaatctcccactctgtcctggaaactggaaagggacccaaggggtgatctttagaacaagcaagtgtggtctgctggctgatgtccccaaacctcactgaccggtaggccagttttcaggtgacagaactgtagccactcaagagtcattatcaaaccactgtaggagttcaccttccctcttctcggtggcatccagcttcctcctttcgaggctctgtgtctgtaatgtggctcaggtcaggagctaatatgagaccctggagcaacattatgatagtttgtgccagtaaagggtcctgtgggcccacctcgttagcctccatgtccagcagtgctctgcagcctgtagtttgcatggatgtaggtaatttctcaggccctctcaccttgctgatgataccttcttacctcactggtaccttcagtgtcacagacctctgcaggcaatgtggaagtgcttgggtaatatcctttttctagagccagccctgaagcatcctgtctgtgctgtggttgcttccaaaaggctccagatattgtttggtacactcagggtttgtggacagccgtgccgtgagcaattgccattataagatggtgctggcttccattgcgcctaactagtaaacaagccttatgcgcaagtgcaagagtgaattcacgcccagtcactgcccatctcggggtgtagtaatggggtgatgggcgagcaactaatcaggtgctgtcacgccacatcaggtgctgaaacgtcacgctgcgggctatataagcagtgccattttccaggttcggggtcttccttatgttgaagcaataaaagctttgccgtagaaggatccggttgtctgagtgaattcttgccggcgagatactagctcgggcgaga

SEQ ID NO: 11 - DNA, 26482 bp, synthetic construct
  misc_feature 1..26482: note = Synthetic
  misc_feature 1..18823: note = Mouse Sequence
  misc_feature 8776..9187: note = Exon 2
  misc_feature 9033..9035: note = Start Codon
  misc_feature 9789..9929: note = Exon 3
  misc_feature 18824..18856: note = Lox71
  misc_feature 18857..24666: note = Inverted Mouse Sequence
  misc_feature 19282..20572: note = Exon 15
  misc_feature 20466..20468: note = Stop Codon
  misc_feature 20686..20786: note = Exon 14
  misc_feature 21663..21739: note = Exon 13
  misc_feature 21812..21937: note = Exon 12
  misc_feature 22046..22167: note = Exon 11
  misc_feature 22247..22459: note = Exon 10
  misc_feature 22762..22978: note = Exon 09
  misc_feature 23089..23268: note = Exon 08
  misc_feature 23342..23544: note = Exon 07
  misc_feature 23633..23728: note = Exon 06
  misc_feature 24028..24135: note = Exon 05
  misc_feature 24255..24340: note = Exon 04
  misc_feature 24667..24700: note = Lox66
  misc_feature 24707..24738: note = Rox
  misc_feature 24745..24770: note = I_Ceu
  misc_feature 24771..24776: note = NheI
  source 1..26482: mol_type = other DNA
ctctgtgcccacccactgccaagagggacaggtctcaaaggtcagggcagtgtcccgggaaggagggcatcggctcctgggagcggccttaggacgcggggtggactctcaccatcgcacaggaagccagccagtccccagatgaagtccgagcagaggtggcagaaggtaggcttggtgagtgtcaccttgcgaaagctgtggccaggtgctgcggagccaatagctctgctagtccgctccggccctgaccccgggcgtgtgcggcccgagatgcccagcactggactgccggccgggctgccaagacgtggggaaccactgcccggccaggtccgggcaccgggctcggctgccgccgccatccacaacccgagcgccccagctccaagcgcacgataaagccaggtccgcggtgtagagagggccctcggcagagcccgctcccggcttccgactgcgctacctaacgcgcaggctcacgtgggcggggccagactggagagggcctcctgaggggcggtgccgtcctgccaaaggcggggcctctggactagacagaggggcatggtggcccaagaggatttgttctgacctccagcgccagattctccacacaggatactagatatatgaggcctttgctcgtataagcataggagaagctatatggaaacattcagtgggacttccacaagctcctttaacccctaattctacgcgcgcgcgcgcgcgcgcacacacacacacacacacaccctcacacacaccatggcaaaactttctcccactgtgttcccaggtctttgagtacctgcatgcaagggaaggccatccacagtaaccatagctttgtgttgtccagacaatgcctatgactttggacctaggagtcattctgcctctattgtcagcagccctcaagggccctgcttctataggccgactctgttttggagttggggaaacactactggaatggtgatccaaaaagttcctggcctctagcctattcccagtagccacagagtgcatcaagggaaggaaacagcgacgagagagctctgtgtgtatgaggacatcctggtctatctagtgagttctaggataactgaggctatgtagagaggctctgtcttttaaaaaaatatatatttattttattttatcagtatgattgatttgcttacattttgtctgtgcctggtgtcagaggaggtcagaatagaaaactggatttcctggaactggagttacagatgtttttgagctgccatgaaggtactagaaatagatctagggtcttctacaaaaaaacaaatgctcttaatctctgagccatctcttcagtttccttagtagtcttcttaacaagtcctggaagtttctagtacaatctaaactaggtctagaatgttttttgtctctgagacttactgtcaaataagctcaccctttcttatgcttcatgaactcttgctggctgctcaactctgctgatctggctcaaattcctctccaagctgactgattcagtatggcttctctctcggcctctgactttttgccctgcttgacctcaaactaactccagcaatctattctactcttctaactccttctcattctctggctcattctgtctttacctatgcctaaattgttctctctgtaaaactctcccagtaaaattgtttgcttgcttgcttgctcttcccctcttcctctcttcctctcccctctctcctgctctctcttaaatagctttcctttcctctctcttcttgtgagatgtgggcagtcctattctgtcaaatcattctctgatttaccactttgccatttaatcagacatcattttcaaacatgggtgcttccttctataaactaactttaccttcattgtttggaattaaagatgtgtgctaagggctaagccacatcataactaaaaaaagatttgttcagtaaataacacagtctcagggtttacagtttgattaaatatcttgcaatacttcccctcttatcactaataaggaaataacagctcaactgtagaataagctacttttgggtttcgctctgttacaaaagatccagatttgattcccaatcactcctccatcatctcctcctcctcctcctcctcctcctcctcctcctcctcctcctcctcctcctcctccttcttcttcctggaactcactttgtagaccaggctggcctcgaactcagaaatcctcctgcctctgcctcccaagtgctgggattaaaggtgcgccaccacctcccaacagcttaaaaccttctataactccagtttcaagattatcttctggcctttatggccaccaggcacacacatggaaagtgattctttagcttcttagtgagtgatgccattgtgaacctgtggtttttctagggttcctctgttcctcttcgctagtctttttgcagactatatctagtgtggtgtatgcccgtaacagctcagggtgctaagaaactgaccttctcccagatgctaaggcacatggtctttttcagctttcccaactcttggccattggcccagcatccactttcacgtcctggcaggttctagtcaggtagcctgcagccatgcagacagctgtctggaaggatgtacaagctacacttccttaggaaagaggcctgacatgccaagcaggctctggtaatcctagttttggttggaacagagcagggctgtgtgtcctaagccttgactggggttcctaagggataagtggttagggcaggaactatagaattgatggcctgcacgactcactggggctccatggtaggctctgctgtccgcctccttggggctctagaacaagaatgcccattttatgtgagtctgggctctgaagtggttggtcttcatatcagagatactccattttctgtctggaattagccaatttgggcatggtaggagtatatatttctaggatcaaagcctcaaatctagcacatagaaagtgagaaaatatagataatataagcaagatatatagaaagtagagattgcccatctgtagtggctattcttggttgtcaacttgacaatatttggaatgaactacaatccggaattggaaggctcaccagtgacccttatctggaggcttggagatccttatctggatcttggtttgaagatcttgagccatagtggctatggattccagaagattgaatctccgagtttaaggaacacacctttaatctgggctacgcctttcatctgggattaaaggtgtggtgggacacacctttaatctgggctacaccttctgctggagacaatataaggacattggaagaagggagtctagctcttgctcttgctcctttgcctgcttgctgtgtgagactgagtaactgctaaatccttggacttccattcacagctgtgactgaacaattgttgggaattgggctgccgaccatctaataaaggtataaactaaacatttttttgggggggagagcactcgagattctgtatgacagaatatgagcagggaaggtggtataggacagagcccactggaaaggaccagctgttgtaatctttttgtataccgtgtaaaggttgtctttgtatattcaaatattgatttctgtaccagcagagagctgagcactagccaactttgggactttggtattgttttttttttttttttaagattctatgtatttattctatgtatatgagtacactgttgctgtcttcagacacagcagaagagggcattggatcccattacagatgactgtgagccaccatgtggttgctgggaattaaactcacgacctttggaagagcagtaagtgctcttaactgctgagccatctctccagcccctggtattgttatttttaaggctcatcagcagtatcatattttgtaaacattcttcctccctagccttttgattggcttaataaagatatgacagccaatagctaaaacgggaattgagggagaaacttccaggctgagagagggtctctgggagaataatctggagaaggggggttgtggcagtgtggcatggaggaggtcctaagtatcagtacggggggtggggcataagtggccatgtggtagacatggactataataaatggattaattaaattagagctaccagggcatagtcttgctataatgcctaagctttaaaaaataataagtctctgtgtttttattcaaatgctggtaagtctaagaaagctcagcagtaccagcaaggcaggcaggctgcttacctcaggcttaagatgacaaaaagtgagttgagtgctgtagttccagctgtcagggctccatactccaacctcacatattaaaaatgtcagtgtgaacaccgaccactgctagtgggtgctcctccaggagctggttcctgatccttttggtgtaattttaacaatgctcagaacagcctacctcagccttgagaggacatccagctctctgggcttcccatagagtccgtttgtgatcacaccttttcagggaagagcctttcttactcaggagcaggtacagcattctatataacccatgcgtcttcagacacaaagtcgtgtgtcttggaatttatttcttgtactgggaacatctgggctaggagatggatgtcatcggttcctctttgaacatccctgcagattctggtcagaatgctgccagcagtctcccagcctccattgctttctacttcgtgaatgataagggactcaccaagcagtctgggatctagggcaggtgacaccttgggtacgatttttttgagtccactatagccccctttcctgtgtttcccttctgctgcctcctcgtgtaagcacactgttgcatctgagattcactggataatctaggataatctcacatcttaagattctaatgcaattatacctgcaaatccccttcatcacatacaacagtggagttaaccctgctaactacctttagtgactgtgttgctattaacatgcagtttaacataacataaatgtgttgctattaacatgcagtttagatacatttgtctttatgcccctatttgtctttatgcccctataagccatttctaccatcattgctttctgcagtcacaatacattagatttatgcagcttttataccccttattttcattctttctgtttcctctgcattcaactgaggatcactctctttctgcttgaagaacagcaggtaatatttccacagtgaaaaatgagtggcaactgctgccctcacaatttctctaaaatgtttctactcaacctttacttttcaaaaacatctgtgtgtttatgtattacatatagatatatttcctactgtgttatgcaggctggcctcaaactcctagcttaagaattcctttggcttcaatctcctcagtgtctgagaatcaaagcataggtcatagcccccacctggaaatgtctttgttgttgttgtttttctgtttttttgttttgttttgtttttgttaaacttaataagctaccaattacttatatgctatttatttatttatttatttatgtcaacatgacacaagctaaggtctttgggggaagaagaatcctcagttgggaaaataccttcatcaaattgtcctttaagggcatttttttgattagtgactgatgtgggagggtccaacccgttgtgggtggtgcatccctgtgcaggtgatcttggggagcaagccagtaagcagctttctaccacatcctctgcttcagttccttcctgcttccatgttcctgccttgagttccagccctgactcagggatgtactaagtgggaagtgtaagtcaaataaaccctttcttcccaagttgctcttttgttttgttcagcaaaagaaaacacactaagatgcttgctttcaggatttaggtttgtttttagtcttcaggttcagtactaatgctgaagctggcgctcgttttattgttcggctttttgaaagcaatgggtcatttccgtttgattgcttccagtatctttttgttgcttgtttcattttgtcttttccctcttggtctttatagctcccaataattttttttcagtgctggggggtctgcatatggccttgcacatactaggcaagaactgtaccactggactccatacccagctcatgactttttgagacaaggtcttgttatttagtctagtctgtcttaaaatatgattcttctgctttaggctgctgagtgctaagattatagacatgtacctccatgggctatttatagtactttttaattttttaatgtttattttgcctctatgtatgtctgtacaccacatgtgtgcagtgtctgtggaggccagaagaaggtgttgggtcccctggaactgtagttacaaatagttgtgggccactgtgcgaatgctgggctttgaaccgctggaaaagcagtcagtgctcataactgatgagatgtctctccagtccatacagtgatttttaaaaatatcggagagcttgattgcgtgcttgtgtgtgtgtgtgtgtgtgtgtgtgtgtgtgttcatggagatgagatcaacattgggtgtcttcttcaattgccctccatctttgagttctttaatattttgtttatttgttatggatgtgtaggagtgcttgagtaccatagcaagcatctaggggtcagaggacaacttacaggaaagagtcagttctctccttctaccatgtagattccagagattgaactcacgtcactaggcttggcagcaggtgttcatgtctgctccctcgcaagatccacctgctttttgagacaaggtctttcttttagtaaacccagagctctgagattctgctagactagctagccagcaagtccccagagagcctcgtgtttccctctccccagggctggggttactagtgttgctaccacgtccagcctttccactagggttcaaattcaggtcacttgactaactcagccacgttcttggcctcaaatttttaaaatttactttcagaaggttatcacggtggccccttcaaatgctatttctgctctactccccttcttattttcagctgcaaattcaattatactgttagaccttgtctcatgtctgtcctgtggtttctgttatttttttttttctgtcactgtggattgtcccccaaatctatcttccagttccttatttctgtcttcagataagtctaatttgtagctaatctaatccattaaggttctgccatctttatgatttacataccataaaacattccaatataaattatagtttttacattttctttaacattttttaaaaaagatttatttattgttctaagtacactgtagctgtcttcagacacaccagaagagggcgtcagatctcattactgatggttgtgagccaccatgtggttgctgggatttgaactcaggacctctggaagagcagtcagtgcccttaaccgccgagccatctcatcagcccttctttaacatttttatgattttacttttgaagattttcaagaacttgaaaatgtctcaatggttaagagaacctgctgttgttacaaagacccagattcaggtcatagacagtggctcacaaccgcttgtaactctagttccaggggatctgataccctcttctagtcttcatgagcaccaggcaggcacatgatacacatatatacattcaggcattcacaaatacacataaaatagaatataggcagctaggtatggtggcacatgcctttaattccagcacctagcagtggcgagagctctgagtgtgaagtcagcctggtctacagattgagttctaggacagccagagttacacagataaaccttgtctaaaaatccataataataataataataataataataataatgacaatgggactagacatggtagcccatgcctttagtttcagcgctcaggaggcagagacaggaagatgtctgtgagtttcaggctagactggtctatacagcaagtcccaagtgaatgaggacaacatattgagactctgcctacattagtcttcatacagaacagagcacccaaccaggtagtatctagttgctgtctatggacaccaaactttgtatttcagtcactacagaagcatcacatgggctcctgactttctgatccttgcacgaggttgtggcatagttttcatttctccacctaaaaaccttccttttaccagctttcctgaggacctcaggaactatgaacactagagaagggtttcttccttggtgtcaggagagatttgcatgagaaaggtgcttttcatgggttgtgaaactcgattgtttggaactgcagaggttaaaggcttgtgctaccaaaagtgacagctaattctgttccatcgttgctaatatcctgctcattgtgtgtgcacaattcaaatcttaaagatttgcactactgaccctgcctttcacagatgttcaggactgatattttggttgcccactacaaggagtcacttggatttcggaacgtctcatccgtccagaatgagagcagtcccatttcggaaaagctctgccaaagcaccttgactttctcccccaaatctaatccttggagcagtcccacagcgccatcttctgatacatttctccactttcaccccacgacactcagtagtgcctgatttgtttttcagagcacctacaggcctccagcgagaccgagacagccgcaagaataatggccgctctgagacacccaagcactgctaatgttggttccatttttggagcgcctgggacgcagcggaactcgccagcacggggcggcgcgtgactgggttcctttttgtcccggcctggcgagaggtcacgtggggcgttacgcagaggcggaacactgcgaccgccgcctaaaaagcttgctgtttaggggcacctggatatcccaaccatgcgacccccgcgtccctcctcagctatgctgacgttttttgctgcgttcttggccgcgcccttggcgctggctgagtcaccgtacctggtgcgtgtggacgcagcccgcccgctgaggcctctgttgcccttctggaggagcaccggcttctggtgaggcccaccacttatcaagtccaggagcgccccttgctctatcctctgggttccccccattacagctttgggctctctgcccatcactcctggacactcagaagcgaagagcaaacccctttagggcccaccttctcaagctagtcagtttctggattgtggcgtgggttttctagcttagtgggtccctcaaatgccagagcctctccctaagtggcccccaggaatcaggagcgcagtactcaggctataggttcatgattggtgctttggcagagcctaggagtctcccaaagtatcaagacctgtcccggtttatgagtgtgccccaagtttttctagaaatactcaaatccattttttatggcaggcagatgctctatttagaatacggttctgtgtcctgtgggagctcccctcaccctgcccccaagcaagactgtagaacattctggtgaatgggctattttatcgtacactctggagacacataattcatccacaagggtctaggcagttaggtaatacatgtacaaaatcgggtatgctgcaggcccctgtttaggacaaacacttcacttctttgtcctgtccctagccccccactgcctcacgaccaggctgaccagtacgaccttagttgggaccagcaactgaaccttgcctacataggtgccgtacctcacagtggcattgagcaggtccggatacactggctgctggatctcatcacagccaggtgggtgatgcggaagtgggtaccctgggagttgctggtcagagcttgttttacagagatgctgaggtggtggatctgaccttgtcggggccagctgtgggacacagtgctgggctgtgggggtcgcgggggtggggggggtcatggtagggcatagggctggggctgtgcttcctgttagagcatcctgttgggcagaagaggagaatgtctgcttggctatgccaaaggcagaccctggatggagcacaggtggtttcctcctgatgttttgttttttgtttttttttagaagtactgaatggggttagggtctactgtgtctggctttgtaccatacatataccacattgtggttaccagtataagctgtatagagacattgtgccccaaggtcaggttgaggttatataagtcacattgccttagaaagtgacactggactgtggctctggagcaggtggctgcctttgcaagggtccagtcaagatgagcacctggcatgaggaggcctttcagaaattcagacccttgaggcttggccatatatccagctcatatctggtacctggtggtacagggaatgggaaagtgtccttttggcatcttggaggtcatataatttgcaggattctgtttcagataagatgacaacatagtatatcaaactgggcactgtgtgggctgagggatcatgtgtgtgggtacagctaccctggttgaacaggcaccagggggcagcagtggactcagaggtagagagtctagatcactgaacccttggtttggaatccttgaatgtattaagggtgctgcactttcctttccttagttggagttccctggcttctccagggcaaaggtggtccaagggtatatctctaatgactttatcattcacaccactcctacagagcactggcttgtgaacacaggtgtgggctcttgagggccctgctagagggcagagtcagcagccagcagctcctcacggcgggcacatgcagcctccacagcactgtgcacactggggaatagcagctcattttcagctccctgttcttccccaaggaagcccccttttctcaacgtgtctctcaccgagggactgcagcaagccagaagcagggtgatgtccaaggccctgtagtctctgcggaggtctttcaatgtggccatgccagccacatccaggaacagcagtggtgcacagtcaatgaccactgtgtggaaaccaaatgccaggggtaccaccagcccagccccactgctcactgaacccagatccttgccatcgacaagactcctgttactgacacctacctccgggccctgatccttcctggtggctgagtgccctgcatccaaccctgtgagtctgtagagagaccgaaggaagaagtccttgttggcgtagtaaagtggacctgtgaaacggaacactcgcacctcaggtgggggcaggaggccctcaaattcagcagcatcctcatagaaggtggagtctccaattcgggcaagaagggcagcccgtggacgctgtgtacggcctgccaggctaagcagggagaagaacactccagctaatagtccagcctcggtgctgactagcacacaggtagctgcagtagccacccagaccagtgcatcggcagggcttagccgccaaagttgtgggagatccttcaccttgcgcagcgccccccgcaggctgacaacaatgatacaagctagcacacatcgctgcagatcatgaaacagtggagccagcaccagcagcaccagcaacaccacagcggcactgaccacactggacaactgggtctggcagccagtggctatcttcaccagagttttggacagagcagcactagtggcaaaacagtggaagaaggcaggcagcacattgcagcagcccacagctagcagctcttggttggcactgacagagtagccatgactacgggcaaacatttctgccaaggagatggagaaggctgagcccacgagggccagggacatggcatccagggccacacgccacattatcttagggtctggtacctgtggggccacaaaaccagtgggaatgttgccagccaccctcgagtcaaaccgtgtatggagctgtccaaaatgggacacaattgtggccaccacaataacaaataactctgtgggtattggcaccttcagacggtgtcggtagcgatctgagagttccttagctgccagcagcactcctaggcacagggcactggtgaccacatcacatatgttggcctgtcccacattctgcagcaagctcaaccatgtgtggaccaccatgcctaggccctggtgccgagggatctgcacacccagcatgtgttttgcctgagaagtcaagatggtcacagaagctcccatagcaaagccatcgagcagtggttgtgagagataggtagacacgaagcccagccggaggatacccatgaggacctgcagatgaagtacagtcagtttgataggttatgagccaggaaccaccatcaatatagaccgaggggtgcgggtcacagggatctacacttgcttatccctctgaatggactccttctgttttccacatatatcatgggccagaacagcggcgagctatgttctgttctatagatgttgcatgtgcatgctcacttctcatgctctcacacatgcagaaattggttttgtttcagaattagggttgtaggcatcgtgaggcagccccttcccccgtgtcttatgtgtagctccttccactaagctccctcccaggcagccacagaatagaagaatagaaggaacagagaagacaaggtcaacagaaaagagcaaggtgtggggagaccaggggaatgaatgcatctctactcccaggtcctgcctgggtcagtaagccaaggtggacattggggttgcagaccacactggccaggccagccctacatattcctccactctgtgccttcagcccctctggtacctaggcctgggctccacctctgcctttgctgtgctattttctctctgagccttagggatactttctctacatgcttccaggctttcctggtagtgagtggcaagcaccttcaggtgctctaagaaactgggacagccagcctacttgctgtgcagctaactctttacctgataaagcccggccatcagagtaagggcagtggcaacccgaatggcatagcagtcccgtctgcagtcctgtagcccaatgatcagtgttgtagctgagttgttgagggtgctgtcattgttcttgggccctagagaatcctgggaagggtcaaagccagccaactggagttctctgtccaccacctgacccaccatgagacacagcaggctgaagatgcccacattaacatggcgggaggtgcccatgaggaagtagatcaggttggcaaagaaggaagtgtagaggctatagatgggttgtaacccagccagcagtgagtaggctatggcctgtggcaccaggataatgccaatgaccaatcctgacatgacatcacctgctaggtattccttaaggcggtactggggcagccagtgtatggcaggaaacagaccctgcaccagagcctgagcacatggcatactgcaggtgcagctcttcttcagcctggccttcagtgtttccagcaagccctgggacacagggggctgccgtcggaccagtaccagtgtcccacccttctgttggggctcaggagaagcatccatcctgtcacaccaggctctttggcttatctgcaagggggaatgggcatggttaggtgtctaggccctcagagcccaggagccagcttcacagtgagtttttgtccacccaaacacagacatcagatatcagagcctgtcctactgacgtgaggttgtacttctgtgtgggtgaatataaggccttgagctccaagatgctagttttattgtgagaggtgtttatggcagcagcatgcctcagggagacatttgacctagcttcaaccccagcagtgctctgtggtctacttaactcagcccctatgtgaagtctgctgtctaaagcattctgaagatcacctacaagggctagactaggcctccaccagcccacatatgcccaagccacaatgacagtagaggcagatgcatcttgaacttgaactccaacctcttcccacccacccacccacccacccacccacccagtctggcaagggtctctgccagacacccaacttctacatgagttctcacaagccatcacctgttctcctgtgaacaccatggacctggaggttggcagaagaccttgtatattgtgtgtgctagggcccttggtctctgatagccttcttcatgagtttagaatgtgtctcaccaggcactagtgtgctgtggaaccagtgtgcccattatgccaagtgctgaatctcttctcagaggctcaagtacaccgaacaagcacactgcttcacagatgtccacctttggcctggctgtcctagccccttctgaccttgctgtggtactgaaaaattctcaggctgtgctgaccacgtgatggccttggtcctgtttacaggttccaaagtgcttgtttgtaatattaatcaaacactctctgttctcttgcaacccaggacatggtggtgactgttggagccaattgtgcttggcctgggtactgggatagcagcttccctggtagggtggttgtctagcaggcattctagctcttgagtaacattataaaaacaatgatacataagggtcattgaacactctgaggctcaccccaagtgtctaggggctcagatgtgtggaggaaggactataagtatcacctgccttgtatctgaacaatccccagagaaatggcaatctaggttcctatttctgcccattaagccaccttttctgggtcctgttgtatgggtacaagggacagttcttacctggggcacctggccggctctgaaggctttgcaatatccaggggcagcagtttgctggtgggctgatcctccaatcactctggcttaacagacagagagctggttggcaggcacctctgaggctgatctgtggagaatactccgctgggctcactgttaaattatttacccaaaagatagctgagtcatgggttttcccagtcaaatgaatgttacctgagctgctaatccggtgagctaatccagcaagttgtactataatcagaggctcacaagtaattacggttatgtgggcatgagataaactcccctttacagaggggtgggtgctccaggtgcagccgcttctgtcttgttatgaggaagaggaggtggagacaggagtggctgaggcaggttacttgagtgtgaggccccagaggaactgcgtgaaatcatgagattctggggtcaaatacagctgactccgcctccccagatgctggttatcttctttccaccatcatggagactgttctggctggagtaagctgaagctcaggccctgttccatgttcccgagggcagtgcatgcgcaaggctactgttgtatgtgtacatacttgtgagtgaacacacacctgtgttgtgcacagcctgtcggcatcaaaataggtgtgttcctcccttgcagcagggattctagattgccctcagcttcatcccccttccttccctcccctccttagtactgaccccctgtaatcctggtgaggtacttggcccccacgtacctctgcaggacatgagacttgccttgtaagaatagcttagagctaaatgtccctttaacattagcttaagtaaccagagatctcagacttgaggcgtgcccctaaattctgtaaggctggtcagaaccctcagatccacatcttgtagtgagcaatgagtttctcacattgtgtttaagagtaagtagttttgtgtaacggtcttgctgtcttctgtgggctcctgtattccgggtgctctcccatgatggaggtagttcttttcattatggctagaaggccagctagtctggtctgctgtctccataggccccagcacagtgggcagtttgctttggggctgcgcaaagtgaagctgtgttttactcctcttatccccaaaggtcttaagaatgggtttaggatcaacaattgtcttacagaaccatctgggaccctgagacttcattcttccaggtcaggggacaataagaattcagagttccttccagttcacaggttggacacttctttgggacattgacaggtcttgtccagttcctgccagccatgggcctgatcccagccccacttgtgggtgagatgggaatggaatgtgagtggagaggccagagtggaaagcctgactgacactgggctggatgctctatggtgtaggtactcctccacctttgctctcaggcaccccacctggatgctgtcctgtctctccaagaaggcctcctgttcctagaagagcctatttagggccccagggttttaacttgttctgtcctacctttgtagggctggacctcctctttcccttacaacaagctctgaagccaccgtttgcacagcagttggtaatggtggcttacaggagcagttacccagtgggtgtggcagagttagtcagaacatctcttgtgtcagataacaggctcctctagtggtctggggataactactggggtgtcatataatgataacttacccagttacccacataagggcctctgaggaatgtactgttgctacatctttgagaatggcagagctgaagttgtggaatgatgccctgtaaacacagaggtgctgggctgtaggacatggtgggagtattcaccttcatttcaaagcagaaagaaaacagtgtagggatggccccacccctttcttccaccctgggtgggagggattggacagacctctcctggttagtgtccacagcaaatggaaatgcagatgaagtcatgtcttccatagtttgcccctgctttacttttccctctacagctctgtgcactcagggtggcgctgcaatgggtatgatcaggctcactgccccaccccagtgtgctcaccttgcctcgctgctgcacacacagggcaggggtatgaggcccatacgtctgtttggtcctatgaagctcggtgattttttttttcttttatctctaagtccaccatttaaatactgcattctttatttgggaagaaaacatcatacccggcccaacagtggaaaatggtggggcggacaggctttaggaccagaccagaatttctgtgccttcctggagcttcagcaggttctcccgagagacaccaagcgtttccgcactacacgcaccacccccatcccgcttggcatcccgcatagtcaggcgtctgtagaccgcgttttcttgtctgcctcagccctcccaagcgttctgagtgcacggctacctccccgcccgctcaggcttcccctccccccaatcctccatgcgctcacccaggcactcaccagccgctgtggcctcatcctctaagctcacgcgctccgcctctagcttcggaggcttgggagttgctgaaggcagctatgaaagggcccttgtgcttctttgctggggctgcgcctagtctggctgtacggagaattgcctgccccagctgggctatggctcaggccactctgcaggggatggcagacttgcctacacctcgcctcaatgacgcgccccctccccactttaggactctaacaccaccaccctcccttcaaggcagcagagagggacaaaggactgctccctagatttcctgggtatgggaggccccgggaggtatggggtaggtgggtgggggtgtcaagcagatacctacctccatactgggtcccagtcttggaacatctctgatctgaaagacgggcctagaacatagcccttttgctgaggcctgcttcctttttttgtttttttgtttttttgttttttttttgttttttttttttttttttttgttttttggtttttttgagacagggtttctctgtatagccctggctgtcctggaagtcactttgtagaccaggctggcctcgaactcagaaatccgcctgcctctggcctcctgagtgcttggattaaaggcgtgcaccaccaccgcctggctgaggcctgcttccttgaagtgtgttctctgcctggtttgtgaagacagggagttgatgacagtttctgcctgggactttggaacaaggatttaatctttatccaaatgcttattaggctttatttatttgcaactggttttgaccattggatgggaaaggaaagagctgagcaggtctgtttgtagctctaggcagaggctccaatccaaaagcacagatggcaggctagacttgggggcagtagctaatgtgaccatgtacagtaagggggttgatgtgcctaggagctgctgcttcttatagaggttgttctatcacctacagtggagagtctgactaccatccctctccagacaaacccacgagctgtcttgcttgtctttagcaagctctcagaccctggcaagaccgactcttcgtacctgttggctggtgccttcaagttacctcagctgcagatttagccttcagggtggctcttcacccctttgctggagttgtaagccagagacagagctccaagcatcagtgtcctgaaatccaaacacttgccctacaactcacctcagatctggcaattgacagtatcctggcgtctcttcctttatgccctttcacctcaattagccactaccaggaccttttcagaatgttgtggctttgttttgtcagatgtctttaagatggcttgtcacctgtctcacgtctttccataccgttcgtatagcatacattatacgaagttatggaacatcagcctattaagatcagcccaggcttacaccttaaaggtagtttccaggtaataggtctgtttggggagattctagaaactttaggatgcagggctgagttaaacaaagcgggtcagtgaagaagtatttagcttaattctatccccactctacttcctgttccctttgaggtgaacagcctcccccctctactagatatcatcatcataatattctccacaaatgcatgggactaagcctcaggcacttcatgcttattgtagccatggatgacccaggagtcctcaactaccactcaagctgatagtaggctgtgatccacaggatgctggcttagaaggtagaatatcagagttacagtgacagggttatgttggcttccacccagatttcaaaggaagacttgggaggccaggtaatgtgtggcaagattggggtggctttatttcagtttattacaagctagagtcatttgggaagaaggaacctcaattgagaaaaatgccccaacaagattgacctatagataagcctgttttcttaaactagtgattgatgtgggagggtccagaccgttgtgggtgggggcccaccctttggctggtgatcccgggatgtgtaagatcatagtctgagtaagcagcacccctccatggcctctccatgacttcctgcctccaggtgcctgcctgactgccttcgatgatagactgtaatgtaggaatacaagtgaagtcaacgcttccctacccagatgcttctgctcattcatcgcggtttatcgaatcaataggaagcccaagacaccagcctaggagaaaggtcatggcggctggaaatggcaacaccacagacacagactgtccagcacatcacaggatcatgggccccgatgctgagaatggagctgcaggatttaacgtttgtcttgctatgctttggtcttgtttcacttaaatccttccctgtcatttctttttcctgttggaatgaagatgcttactctgtgcagtattgtatttcagaagtacataacttcatttttgatattacagaagctcaagaaactaaatttagactctgtgtgtgtgtgtgtgtgtgtgtgtgtgtgtgtaccaagcactctacttgatttttctaaaacagggtttcttactgaacctggagcttgcagtttcaggtagactggaaggccagggaaccctggcctgtctctgtcccttccaccaacactaggacaataggcatatattgccatgcccagcctatacatgagtgctagatatctgaacacaagtccctgggcctgcacagcaagcactttatctactgagccatctttccagtcccacatttaaactttttgaacagctgggcatggggaggaaggtgggcaaaggtcactccaactgggcctataaagtgcttagccacaaagactgaccctaagtctgaggtagagaaagacactttaaagggaaataggggaagaacaatagaagctgacagtcagctgcctagctaatggcagtctagctcatactggttgactccattcaccagtcagcacagattcacaagtcactaggagccagtggctctcatgaggcagggacatccaggtaagtcacagggtcggagaaggggcctggccgggcccagtaatccaatgctcgaactcggtaggagccagagaccacagctgtgtctgcagacacaaaagcatatgtcttctgaagttctcaaaccccagacccaacctacatcatactgtactgaggtccagcagtacaattgccaagactaaggttttagtcatacctgggctgaacacaaagaggttaaaagtagacggcctcctgttgattggggcatactcttcacctttctgggaaaactggatctcatatgtccacaggcacctgaggagggatgggtctgtactgaagctggtgctagctaaactctgaaggcctggatgggtgggatagggtggacccacaaccctatactcttcaggtcccttgctaacacatccaaggtccctgggcactctcaaaattgtgacaggacacactgagggaattggagactatcactgtaggtgatctccaactcagacacaagtgggtctgtgcaggtgtgtacagtgtgtatagaacacacgacagcagagggtctgtgcaggtgtgtacagtgtgtatagaacacatgacagcagagggtctgtgcaggtgtgtacagtgtgtatagaacacatgacagcagagggtctgtgcaggtgtgtacagtgtgtatagaacacacgacagcagagggtctgtgcaggtgtgtacagtgtgtatagaacacacgacagcagagggtctgtgcaggtgtgtacagtgtgtatagaacacacgacagcagagggtctgtgcaggtgtgtacagtgtgtatagaacacaaaacagcagagggtctgtgcaggtgtgtacagtgtgtatagaacacacgacagcagagggtctgtgcaggtgtgtacagtgtgtatagaacacatgacagcagagggtctgtgcaggtgtgtacagtgtgtatagaacacacgacagcagaggtctgtgcaggtgtgtacagtgtgtatagaacacgtgacagcagagggtgtgtgcaggtgtgtacagtgtgtatagaacacatgacagcagagggtctgtgcaggtgtgtacagtgtgtatagaacacatgacagcagagggagatgaatgattactaaggtgatgacatagaaaaggaggaccaccccactcacgcacttggagcccacacgctcatctgaccagaccaaaatcagctgtccatgtgtcaggggcagtgcacggagccggctgacctgtaaggagggagtagctatgaaggtctgagctagccagcctcacaggtagggtaggaggctgccacttgcctgcccaggtggcttcaaggggcgtgtgcatacatgcaccagcaggagtgatggcaccggaagcttccggtgtagggtcaggcggcccctagcaggaaaggggcgtggtgcctcagccacggggtcctggggataatgaagggcccgtggttggcaaatctcagtacctaagaaacccctccctccctccctccctccctccctccctccctccctccctacttgcccacaaacctccaccatgcgcatacgtcggaactgctctgcagaggggaagactggctggcccatgtgctgccacgcactgtaggggctgctgagttgattgtctaagtagagtactatgtagacaagatctgtggaaccagacaccatggtttgcctccctgggcccactacagctgggttcccaccttctttcagaaccccactcacccaagccaggaggtaccccacgcaggcgaagagtcacagggatactgtggttggggtgtgcgtgggtgtcatcactagtgtagatgaggactgtggtactccaggccgctgcggagccttcagggtgatgggtgctggccaggacacccactgtatgattgctgtccaacacagccccagcctttgagacctctgcccagagttgttctccatctataagccaagcagagggctgaggctgttggctctctcatacctagcatctggcttcctaccctaatatctagctcccaccatttgtatactgggagtctgttatactgttcagcccacaggatgggaggagatgaagaggtagaaatttggaaaaccaacctaagaaactcacacagcagctggaggaaatatgcttttgcaccttcccagcatgttccctcaatacaggatgtgccaggctttacatggtctttttcactttgtgactcagcacatacagaagcaaggtcattactcacccaacagggccatgagccccatgactgtgagtactggctttcgcagcaactgcacgtggggtgggtgagtattgttgacctggaatcgagcagtaagtgtgcgctgggagaaagggtacgggtggtagctcaggaaggcattgtcattgctgaggagcacatagcgcatggaggaactgctgttggcaaacagcaggttctggtgctgtgcaatgacctgtggatgtgaagacagttggaacctgtatcactggccactggtactgtccccacccccaccaaggaaggcctcctgaggttggaggaggcatgatggcaaggacccaccttcaccaccagggccgcataagtcacatcagctctccaaggttgtggcagggaccagcccaccagagggtctgcctcgtcattgtaaataggggtatccttgaactcagggaagagctgctggacctgctccacaactgccatctcctgctccaggatggcgatggagctacctgcaccctgagccagcacatacctcactcagtacaggctcagctcaaaggaggcagggaggggtgggagcaccacacaccttcttgtgcagggagatgtaatccagacgcacgcccacctcgccagtgaagaagttggttccattggcacagtgacccaggaggctccagcacattggtgaccttggcagggggtggaaggaatccccaggaccacccaacttcaaagtggggctggcaatgcgcagcccctcagagcaggcatcatagtaattcaggaagcctagggcaggagggtcttgagggtctgggattgtcctgcttccctctcatacagcccacccaacagggtctggaaaaacgctgcctaccttgtgtggtcatggacacgttgtcaaagtcatggtggtctggttcattccaagtctcaaagttccacttggaaacgtgtgtcagcccatacctacctgcagagggagctctactctcaggtttggggatggagcccacctggtatctcctaggacccatgaattgtgtgtgtgtgtggggggggggaggggttccacttgaatgggattacctggcttcaagcaagtaccctaccccacccctatcaggtgaatctctcacccatcaggcatctcaggctagggaatagtgatgtctttggcagagaagaccacgaggtggcctgggtgatcaaggaggagaacctcccggggacaacccactacagtccccaggatttcccccttctattcaccaatgtatctcctggccaagagagaaaccaggtccttccattcaaacacctgctgcttgtcatcaaagtccgtgaagtacccagaaggactgcccatgagctcaaatcctgaaacacacaagagtagttgtcccatcatacccaactatttcagttagtgctgagatagcaccaccctccaggacagagaatggcgggtggtgggagaacgctgggccattgctcaccagggagaagctggttctccatgagaaggtccaagaatgcatccaagtgggtgaagttgtacataagtccctgcccaggtgacttcctgtgaggggggggggaggtcagtcctggagagagcagcagtatttctccacactctggtttaaaactagggccacactcaagcatatgggggccccaagttctcagggagagccaggataccagatgggctttctttccctttggaaaagactagcattgtgaaagtctgacatgtttgagtatgtatgagtatgtgtacatagaaccctacactaagccttaaagaccctgaaaacttggggaaactatgaaagcttctatcacactcatcatggaatgtgaatgtgtgtgtctgaaaccttcaagatattcaagtagggctcttaccgttcgtataatgtatgctatacgaagttatctcgagtaactttaaataatgccaattatttaaagttatgtacataactataacggtcctaaggtagcgagctagcgaagaaccctctctcctttagtacaaacccctggtgtgccccaccagagagcctgttggacacacgtgtccttaattcattctgcacatttttcttctctccatcagcacacagaagttcagcatacagaggtttgtgctgaaatgtaggcgtactcccaagctctccccagagtactatcacctactgtccaggaaatgagtctgagtgcagtgctcatatacactgcatggctacatccaaagtcagagttcctctgccctcatgcctcttgaagtgaacgaaatgtgatgaccttctgcagggtgttttttagtcctctgtggaccctaggctggccttggcatcttggctcacctgtcccagagttactactattaagattacaggtgtgtaccaccatgcctgccaattacctctcactttaaataaaatatgacatttcccactaccatgagatcacccacaacaggcttctctggagaatcctgagcttttcagagcttgtctcccaccccttggaaatatgttttactaagccctctgaggcatgtaacttcttgcctaccaagccagtgagcatgaccagcaggttgcattaattttgggagagtgatatcatcaaggcaaacttgaggtgtgctgacagccattatgggaaaagaagactgctcttgatgagacaaagagcactttacagtggagaagctggtgtgtcaggcagccaggcctcagatatagtgggtgttgccctggttatgcatgtaatacccggggggtggggggtggttatgaggatctggagagagacctcctaatctcccactctgtcctggaaactggaaagggacccaaggggtgatctttagaacaagcaagtgtggtctgctggctgatgtccccaaacctcactgaccggtaggccagttttcaggtgacagaactgtagccactcaagagtcattatcaaaccactgtaggagttcaccttccctcttctcggtggcatccagcttcctcctttcgaggctctgtgtctgtaatgtggctcaggtcaggagctaatatgagaccctggagcaacattatgatagtttgtgccagtaaagggtcctgtgggcccacctcgttagcctccatgtccagcagtgctctgcagcctgtagtttgcatggatgtaggtaatttctcaggccctctcaccttgctgatgataccttcttacctcactggtaccttcagtgtcacagacctctgcaggcaatgtggaagtgcttgggtaatatcctttttctagagccagccctgaagcatcctgtctgtgctgtggttgcttccaaaaggctccagatattgtttggtacactcagggtttgtggacagccgtgccgtgagcaattgccattataagatggtgctggcttccattgcgcctaactagtaaacaagccttatgcgcaagtgcaagagtgaattcacgcccagtcactgcccatctcggggtgtagtaatggggtgatgggcgagcaactaatcaggtgctgtcacgccacatcaggtgctgaaacgtcacgctgcgggctatataagcagtgccattttccaggttcggggtcttccttatgttgaagcaataaaagctttgccgtagaaggatccggttgtctgagtgaattcttgccggcgagatactagctcgggcgaga

SEQ ID NO: 12 - DNA, 26483 bp, synthetic construct
  misc_feature 1..26483: note = Synthetic
  misc_feature 1..18823: note = Mouse Sequence
  misc_feature 8776..9187: note = Exon 2
  misc_feature 9033..9035: note = Start Codon
  misc_feature 9789..9929: note = Exon 3
  misc_feature 18824..18857: note = Lox**
  misc_feature 18858..24667: note = Mouse Sequence
  misc_feature 19184..19269: note = Exon 04
  misc_feature 19389..19496: note = Exon 05
  misc_feature 19796..19891: note = Exon 06
  misc_feature 19980..20182: note = Exon 07
  misc_feature 20256..20435: note = Exon 08
  misc_feature 20546..20762: note = Exon 09
  misc_feature 21065..21277: note = Exon 10
  misc_feature 21357..21478: note = Exon 11
  misc_feature 21587..21712: note = Exon 12
  misc_feature 21785..21861: note = Exon 13
  misc_feature 22738..22838: note = Exon 14
  misc_feature 22952..24242: note = Exon 15
  misc_feature 23056..23058: note = Stop Codon
  misc_feature 24668..24701: note = LoxP
  misc_feature 24708..24739: note = Rox
  misc_feature 24746..24771: note = I_Ceu
  misc_feature 24772..24777: note = NheI
  source 1..26483: mol_type = other DNA
ctctgtgcccacccactgccaagagggacaggtctcaaaggtcagggcagtgtcccgggaaggagggcatcggctcctgggagcggccttaggacgcggggtggactctcaccatcgcacaggaagccagccagtccccagatgaagtccgagcagaggtggcagaaggtaggcttggtgagtgtcaccttgcgaaagctgtggccaggtgctgcggagccaatagctctgctagtccgctccggccctgaccccgggcgtgtgcggcccgagatgcccagcactggactgccggccgggctgccaagacgtggggaaccactgcccggccaggtccgggcaccgggctcggctgccgccgccatccacaacccgagcgccccagctccaagcgcacgataaagccaggtccgcggtgtagagagggccctcggcagagcccgctcccggcttccgactgcgctacctaacgcgcaggctcacgtgggcggggccagactggagagggcctcctgaggggcggtgccgtcctgccaaaggcggggcctctggactagacagaggggcatggtggcccaagaggatttgttctgacctccagcgccagattctccacacaggatactagatatatgaggcctttgctcgtataagcataggagaagctatatggaaacattcagtgggacttccacaagctcctttaacccctaattctacgcgcgcgcgcgcgcgcgcacacacacacacacacacaccctcacacacaccatggcaaaactttctcccactgtgttcccaggtctttgagtacctgcatgcaagggaaggccatccacagtaaccatagctttgtgttgtccagacaatgcctatgactttggacctaggagtcattctgcctctattgtcagcagccctcaagggccctgcttctataggccgactctgttttggagttggggaaacactactggaatggtgatccaaaaagttcctggcctctagcctattcccagtagccacagagtgcatcaagggaaggaaacagcgacgagagagctctgtgtgtatgaggacatcctggtctatctagtgagttctaggataactgaggctatgtagagaggctctgtcttttaaaaaaatatatatttattttattttatcagtatgattgatttgcttacattttgtctgtgcctggtgtcagaggaggtcagaatagaaaactggatttcctggaactggagttacagatgtttttgagctgccatgaaggtactagaaatagatctagggtcttctacaaaaaaacaaatgctcttaatctctgagccatctcttcagtttccttagtagtcttcttaacaagtcctggaagtttctagtacaatctaaactaggtctagaatgttttttgtctctgagacttactgtcaaataagctcaccctttcttatgcttcatgaactcttgctggctgctcaactctgctgatctggctcaaattcctctccaagctgactgattcagtatggcttctctctcggcctctgactttttgccctgcttgacctcaaactaactccagcaatctattctactcttctaactccttctcattctctggctcattctgtctttacctatgcctaaattgttctctctgtaaaactctcccagtaaaattgtttgcttgcttgcttgctcttcccctcttcctctcttcctctcccctctctcctgctctctcttaaatagctttcctttcctctctcttcttgtgagatgtgggcagtcctattctgtcaaatcattctctgatttaccactttgccatttaatcagacatcattttcaaacatgggtgcttccttctataaactaactttaccttcattgtttggaattaaagatgtgtgctaagggctaagccacatcataactaaaaaaagatttgttcagtaaataacacagtctcagggtttacagtttgattaaatatcttgcaatacttcccctcttatcactaataaggaaataacagctcaactgtagaataagctacttttgggtttcgctctgttacaaaagatccagatttgattcccaatcactcctccatcatctcctcctcctcctcctcctcctcctcctcctcctcctcctcctcctcctcctcctccttcttcttcctggaactcactttgtagaccaggctggcctcgaactcagaaatcctcctgcctctgcctcccaagtgctgggattaaaggtgcgccaccacctcccaacagcttaaaaccttctataactccagtttcaagattatcttctggcctttatggccaccaggcacacacatggaaagtgattctttagcttcttagtgagtgatgccattgtgaacctgtggtttttctagggttcctctgttcctcttcgctagtctttttgcagactatatctagtgtggtgtatgcccgtaacagctcagggtgctaagaaactgaccttctcccagatgctaaggcacatggtctttttcagctttcccaactcttggccattggcccagcatccactttcacgtcctggcaggttctagtcaggtagcctgcagccatgcagacagctgtctggaaggatgtacaagctacacttccttaggaaagaggcctgacatgccaagcaggctctggtaatcctagttttggttggaacagagcagggctgtgtgtcctaagccttgactggggttcctaagggataagtggttagggcaggaactatagaattgatggcctgcacgactcactggggctccatggtaggctctgctgtccgcctccttggggctctagaacaagaatgcccattttatgtgagtctgggctctgaagtggttggtcttcatatcagagatactccattttctgtctggaattagccaatttgggcatggtaggagtatatatttctaggatcaaagcctcaaatctagcacatagaaagtgagaaaatatagataatataagcaagatatatagaaagtagagattgcccatctgtagtggctattcttggttgtcaacttgacaatatttggaatgaactacaatccggaattggaaggctcaccagtgacccttatctggaggcttggagatccttatctggatcttggtttgaagatcttgagccatagtggctatggattccagaagattgaatctccgagtttaaggaacacacctttaatctgggctacgcctttcatctgggattaaaggtgtggtgggacacacctttaatctgggctacaccttctgctggagacaatataaggacattggaagaagggagtctagctcttgctcttgctcctttgcctgcttgctgtgtgagactgagtaactgctaaatccttggacttccattcacagctgtgactgaacaattgttgggaattgggctgccgaccatctaataaaggtataaactaaacatttttttgggggggagagcactcgagattctgtatgacagaatatgagcagggaaggtggtataggacagagcccactggaaaggaccagctgttgtaatctttttgtataccgtgtaaaggttgtctttgtatattcaaatattgatttctgtaccagcagagagctgagcactagccaactttgggactttggtattgttttttttttttttttaagattctatgtatttattctatgtatatgagtacactgttgctgtcttcagacacagcagaagagggcattggatcccattacagatgactgtgagccaccatgtggttgctgggaattaaactcacgacctttggaagagcagtaagtgctcttaactgctgagccatctctccagcccctggtattgttatttttaaggctcatcagcagtatcatattttgtaaacattcttcctccctagccttttgattggcttaataaagatatgacagccaatagctaaaacgggaattgagggagaaacttccaggctgagagagggtctctgggagaataatctggagaaggggggttgtggcagtgtggcatggaggaggtcctaagtatcagtacggggggtggggcataagtggccatgtggtagacatggactataataaatggattaattaaattagagctaccagggcatagtcttgctataatgcctaagctttaaaaaataataagtctctgtgtttttattcaaatgctggtaagtctaagaaagctcagcagtaccagcaaggcaggcaggctgcttacctcaggcttaagatgacaaaaagtgagttgagtgctgtagttccagctgtcagggctccatactccaacctcacatattaaaaatgtcagtgtgaacaccgaccactgctagtgggtgctcctccaggagctggttcctgatccttttggtgtaattttaacaatgctcagaacagcctacctcagccttgagaggacatccagctctctgggcttcccatagagtccgtttgtgatcacaccttttcagggaagagcctttcttactcaggagcaggtacagcattctatataacccatgcgtcttcagacacaaagtcgtgtgtcttggaatttatttcttgtactgggaacatctgggctaggagatggatgtcatcggttcctctttgaacatccctgcagattctggtcagaatgctgccagcagtctcccagcctccattgctttctacttcgtgaatgataagggactcaccaagcagtctgggatctagggcaggtgacaccttgggtacgatttttttgagtccactatagccccctttcctgtgtttcccttctgctgcctcctcgtgtaagcacactgttgcatctgagattcactggataatctaggataatctcacatcttaagattctaatgcaattatacctgcaaatccccttcatcacatacaacagtggagttaaccctgctaactacctttagtgactgtgttgctattaacatgcagtttaacataacataaatgtgttgctattaacatgcagtttagatacatttgtctttatgcccctatttgtctttatgcccctataagccatttctaccatcattgctttctgcagtcacaatacattagatttatgcagcttttataccccttattttcattctttctgtttcctctgcattcaactgaggatcactctctttctgcttgaagaacagcaggtaatatttccacagtgaaaaatgagtggcaactgctgccctcacaatttctctaaaatgtttctactcaacctttacttttcaaaaacatctgtgtgtttatgtattacatatagatatatttcctactgtgttatgcaggctggcctcaaactcctagcttaagaattcctttggcttcaatctcctcagtgtctgagaatcaaagcataggtcatagcccccacctggaaatgtctttgttgttgttgtttttctgtttttttgttttgttttgtttttgttaaacttaataagctaccaattacttatatgctatttatttatttatttatttatgtcaacatgacacaagctaaggtctttgggggaagaagaatcctcagttgggaaaataccttcatcaaattgtcctttaagggcatttttttgattagtgactgatgtgggagggtccaacccgttgtgggtggtgcatccctgtgcaggtgatcttggggagcaagccagtaagcagctttctaccacatcctctgcttcagttccttcctgcttccatgttcctgccttgagttccagccctgactcagggatgtactaagtgggaagtgtaagtcaaataaaccctttcttcccaagttgctcttttgttttgttcagcaaaagaaaacacactaagatgcttgctttcaggatttaggtttgtttttagtcttcaggttcagtactaatgctgaagctggcgctcgttttattgttcggctttttgaaagcaatgggtcatttccgtttgattgcttccagtatctttttgttgcttgtttcattttgtcttttccctcttggtctttatagctcccaataattttttttcagtgctggggggtctgcatatggccttgcacatactaggcaagaactgtaccactggactccatacccagctcatgactttttgagacaaggtcttgttatttagtctagtctgtcttaaaatatgattcttctgctttaggctgctgagtgctaagattatagacatgtacctccatgggctatttatagtactttttaattttttaatgtttattttgcctctatgtatgtctgtacaccacatgtgtgcagtgtctgtggaggccagaagaaggtgttgggtcccctggaactgtagttacaaatagttgtgggccactgtgcgaatgctgggctttgaaccgctggaaaagcagtcagtgctcataactgatgagatgtctctccagtccatacagtgatttttaaaaatatcggagagcttgattgcgtgcttgtgtgtgtgtgtgtgtgtgtgtgtgtgtgtgttcatggagatgagatcaacattgggtgtcttcttcaattgccctccatctttgagttctttaatattttgtttatttgttatggatgtgtaggagtgcttgagtaccatagcaagcatctaggggtcagaggacaacttacaggaaagagtcagttctctccttctaccatgtagattccagagattgaactcacgtcactaggcttggcagcaggtgttcatgtctgctccctcgcaagatccacctgctttttgagacaaggtctttcttttagtaaacccagagctctgagattctgctagactagctagccagcaagtccccagagagcctcgtgtttccctctccccagggctggggttactagtgttgctaccacgtccagcctttccactagggttcaaattcaggtcacttgactaactcagccacgttcttggcctcaaatttttaaaatttactttcagaaggttatcacggtggccccttcaaatgctatttctgctctactccccttcttattttcagctgcaaattcaattatactgttagaccttgtctcatgtctgtcctgtggtttctgttatttttttttttctgtcactgtggattgtcccccaaatctatcttccagttccttatttctgtcttcagataagtctaatttgtagctaatctaatccattaaggttctgccatctttatgatttacataccataaaacattccaatataaattatagtttttacattttctttaacattttttaaaaaagatttatttattgttctaagtacactgtagctgtcttcagacacaccagaagagggcgtcagatctcattactgatggttgtgagccaccatgtggttgctgggatttgaactcaggacctctggaagagcagtcagtgcccttaaccgccgagccatctcatcagcccttctttaacatttttatgattttacttttgaagattttcaagaacttgaaaatgtctcaatggttaagagaacctgctgttgttacaaagacccagattcaggtcatagacagtggctcacaaccgcttgtaactctagttccaggggatctgataccctcttctagtcttcatgagcaccaggcaggcacatgatacacatatatacattcaggcattcacaaatacacataaaatagaatataggcagctaggtatggtggcacatgcctttaattccagcacctagcagtggcgagagctctgagtgtgaagtcagcctggtctacagattgagttctaggacagccagagttacacagataaaccttgtctaaaaatccataataataataataataataataataataatgacaatgggactagacatggtagcccatgcctttagtttcagcgctcaggaggcagagacaggaagatgtctgtgagtttcaggctagactggtctatacagcaagtcccaagtgaatgaggacaacatattgagactctgcctacattagtcttcatacagaacagagcacccaaccaggtagtatctagttgctgtctatggacaccaaactttgtatttcagtcactacagaagcatcacatgggctcctgactttctgatccttgcacgaggttgtggcatagttttcatttctccacctaaaaaccttccttttaccagctttcctgaggacctcaggaactatgaacactagagaagggtttcttccttggtgtcaggagagatttgcatgagaaaggtgcttttcatgggttgtgaaactcgattgtttggaactgcagaggttaaaggcttgtgctaccaaaagtgacagctaattctgttccatcgttgctaatatcctgctcattgtgtgtgcacaattcaaatcttaaagatttgcactactgaccctgcctttcacagatgttcaggactgatattttggttgcccactacaaggagtcacttggatttcggaacgtctcatccgtccagaatgagagcagtcccatttcggaaaagctctgccaaagcaccttgactttctcccccaaatctaatccttggagcagtcccacagcgccatcttctgatacatttctccactttcaccccacgacactcagtagtgcctgatttgtttttcagagcacctacaggcctccagcgagaccgagacagccgcaagaataatggccgctctgagacacccaagcactgctaatgttggttccatttttggagcgcctgggacgcagcggaactcgccagcacggggcggcgcgtgactgggttcctttttgtcccggcctggcgagaggtcacgtggggcgttacgcagaggcggaacactgcgaccgccgcctaaaaagcttgctgtttaggggcacctggatatcccaaccatgcgacccccgcgtccctcctcagctatgctgacgttttttgctgcgttcttggccgcgcccttggcgctggctgagtcaccgtacctggtgcgtgtggacgcagcccgcccgctgaggcctctgttgcccttctggaggagcaccggcttctggtgaggcccaccacttatcaagtccaggagcgccccttgctctatcctctgggttccccccattacagctttgggctctctgcccatcactcctggacactcagaagcgaagagcaaacccctttagggcccaccttctcaagctagtcagtttctggattgtggcgtgggttttctagcttagtgggtccctcaaatgccagagcctctccctaagtggcccccaggaatcaggagcgcagtactcaggctataggttcatgattggtgctttggcagagcctaggagtctcccaaagtatcaagacctgtcccggtttatgagtgtgccccaagtttttctagaaatactcaaatccattttttatggcaggcagatgctctatttagaatacggttctgtgtcctgtgggagctcccctcaccctgcccccaagcaagactgtagaacattctggtgaatgggctattttatcgtacactctggagacacataattcatccacaagggtctaggcagttaggtaatacatgtacaaaatcgggtatgctgcaggcccctgtttaggacaaacacttcacttctttgtcctgtccctagccccccactgcctcacgaccaggctgaccagtacgaccttagttgggaccagcaactgaaccttgcctacataggtgccgtacctcacagtggcattgagcaggtccggatacactggctgctggatctcatcacagccaggtgggtgatgcggaagtgggtaccctgggagttgctggtcagagcttgttttacagagatgctgaggtggtggatctgaccttgtcggggccagctgtgggacacagtgctgggctgtgggggtcgcgggggtggggggggtcatggtagggcatagggctggggctgtgcttcctgttagagcatcctgttgggcagaagaggagaatgtctgcttggctatgccaaaggcagaccctggatggagcacaggtggtttcctcctgatgttttgttttttgtttttttttagaagtactgaatggggttagggtctactgtgtctggctttgtaccatacatataccacattgtggttaccagtataagctgtatagagacattgtgccccaaggtcaggttgaggttatataagtcacattgccttagaaagtgacactggactgtggctctggagcaggtggctgcctttgcaagggtccagtcaagatgagcacctggcatgaggaggcctttcagaaattcagacccttgaggcttggccatatatccagctcatatctggtacctggtggtacagggaatgggaaagtgtccttttggcatcttggaggtcatataatttgcaggattctgtttcagataagatgacaacatagtatatcaaactgggcactgtgtgggctgagggatcatgtgtgtgggtacagctaccctggttgaacaggcaccagggggcagcagtggactcagaggtagagagtctagatcactgaacccttggtttggaatccttgaatgtattaagggtgctgcactttcctttccttagttggagttccctggcttctccagggcaaaggtggtccaagggtatatctctaatgactttatcattcacaccactcctacagagcactggcttgtgaacacaggtgtgggctcttgagggccctgctagagggcagagtcagcagccagcagctcctcacggcgggcacatgcagcctccacagcactgtgcacactggggaatagcagctcattttcagctccctgttcttccccaaggaagcccccttttctcaacgtgtctctcaccgagggactgcagcaagccagaagcagggtgatgtccaaggccctgtagtctctgcggaggtctttcaatgtggccatgccagccacatccaggaacagcagtggtgcacagtcaatgaccactgtgtggaaaccaaatgccaggggtaccaccagcccagccccactgctcactgaacccagatccttgccatcgacaagactcctgttactgacacctacctccgggccctgatccttcctggtggctgagtgccctgcatccaaccctgtgagtctgtagagagaccgaaggaagaagtccttgttggcgtagtaaagtggacctgtgaaacggaacactcgcacctcaggtgggggcaggaggccctcaaattcagcagcatcctcatagaaggtggagtctccaattcgggcaagaagggcagcccgtggacgctgtgtacggcctgccaggctaagcagggagaagaacactccagctaatagtccagcctcggtgctgactagcacacaggtagctgcagtagccacccagaccagtgcatcggcagggcttagccgccaaagttgtgggagatccttcaccttgcgcagcgccccccgcaggctgacaacaatgatacaagctagcacacatcgctgcagatcatgaaacagtggagccagcaccagcagcaccagcaacaccacagcggcactgaccacactggacaactgggtctggcagccagtggctatcttcaccagagttttggacagagcagcactagtggcaaaacagtggaagaaggcaggcagcacattgcagcagcccacagctagcagctcttggttggcactgacagagtagccatgactacgggcaaacatttctgccaaggagatggagaaggctgagcccacgagggccagggacatggcatccagggccacacgccacattatcttagggtctggtacctgtggggccacaaaaccagtgggaatgttgccagccaccctcgagtcaaaccgtgtatggagctgtccaaaatgggacacaattgtggccaccacaataacaaataactctgtgggtattggcaccttcagacggtgtcggtagcgatctgagagttccttagctgccagcagcactcctaggcacagggcactggtgaccacatcacatatgttggcctgtcccacattctgcagcaagctcaaccatgtgtggaccaccatgcctaggccctggtgccgagggatctgcacacccagcatgtgttttgcctgagaagtcaagatggtcacagaagctcccatagcaaagccatcgagcagtggttgtgagagataggtagacacgaagcccagccggaggatacccatgaggacctgcagatgaagtacagtcagtttgataggttatgagccaggaaccaccatcaatatagaccgaggggtgcgggtcacagggatctacacttgcttatccctctgaatggactccttctgttttccacatatatcatgggccagaacagcggcgagctatgttctgttctatagatgttgcatgtgcatgctcacttctcatgctctcacacatgcagaaattggttttgtttcagaattagggttgtaggcatcgtgaggcagccccttcccccgtgtcttatgtgtagctccttccactaagctccctcccaggcagccacagaatagaagaatagaaggaacagagaagacaaggtcaacagaaaagagcaaggtgtggggagaccaggggaatgaatgcatctctactcccaggtcctgcctgggtcagtaagccaaggtggacattggggttgcagaccacactggccaggccagccctacatattcctccactctgtgccttcagcccctctggtacctaggcctgggctccacctctgcctttgctgtgctattttctctctgagccttagggatactttctctacatgcttccaggctttcctggtagtgagtggcaagcaccttcaggtgctctaagaaactgggacagccagcctacttgctgtgcagctaactctttacctgataaagcccggccatcagagtaagggcagtggcaacccgaatggcatagcagtcccgtctgcagtcctgtagcccaatgatcagtgttgtagctgagttgttgagggtgctgtcattgttcttgggccctagagaatcctgggaagggtcaaagccagccaactggagttctctgtccaccacctgacccaccatgagacacagcaggctgaagatgcccacattaacatggcgggaggtgcccatgaggaagtagatcaggttggcaaagaaggaagtgtagaggctatagatgggttgtaacccagccagcagtgagtaggctatggcctgtggcaccaggataatgccaatgaccaatcctgacatgacatcacctgctaggtattccttaaggcggtactggggcagccagtgtatggcaggaaacagaccctgcaccagagcctgagcacatggcatactgcaggtgcagctcttcttcagcctggccttcagtgtttccagcaagccctgggacacagggggctgccgtcggaccagtaccagtgtcccacccttctgttggggctcaggagaagcatccatcctgtcacaccaggctctttggcttatctgcaagggggaatgggcatggttaggtgtctaggccctcagagcccaggagccagcttcacagtgagtttttgtccacccaaacacagacatcagatatcagagcctgtcctactgacgtgaggttgtacttctgtgtgggtgaatataaggccttgagctccaagatgctagttttattgtgagaggtgtttatggcagcagcatgcctcagggagacatttgacctagcttcaaccccagcagtgctctgtggtctacttaactcagcccctatgtgaagtctgctgtctaaagcattctgaagatcacctacaagggctagactaggcctccaccagcccacatatgcccaagccacaatgacagtagaggcagatgcatcttgaacttgaactccaacctcttcccacccacccacccacccacccacccacccagtctggcaagggtctctgccagacacccaacttctacatgagttctcacaagccatcacctgttctcctgtgaacaccatggacctggaggttggcagaagaccttgtatattgtgtgtgctagggcccttggtctctgatagccttcttcatgagtttagaatgtgtctcaccaggcactagtgtgctgtggaaccagtgtgcccattatgccaagtgctgaatctcttctcagaggctcaagtacaccgaacaagcacactgcttcacagatgtccacctttggcctggctgtcctagccccttctgaccttgctgtggtactgaaaaattctcaggctgtgctgaccacgtgatggccttggtcctgtttacaggttccaaagtgcttgtttgtaatattaatcaaacactctctgttctcttgcaacccaggacatggtggtgactgttggagccaattgtgcttggcctgggtactgggatagcagcttccctggtagggtggttgtctagcaggcattctagctcttgagtaacattataaaaacaatgatacataagggtcattgaacactctgaggctcaccccaagtgtctaggggctcagatgtgtggaggaaggactataagtatcacctgccttgtatctgaacaatccccagagaaatggcaatctaggttcctatttctgcccattaagccaccttttctgggtcctgttgtatgggtacaagggacagttcttacctggggcacctggccggctctgaaggctttgcaatatccaggggcagcagtttgctggtgggctgatcctccaatcactctggcttaacagacagagagctggttggcaggcacctctgaggctgatctgtggagaatactccgctgggctcactgttaaattatttacccaaaagatagctgagtcatgggttttcccagtcaaatgaatgttacctgagctgctaatccggtgagctaatccagcaagttgtactataatcagaggctcacaagtaattacggttatgtgggcatgagataaactcccctttacagaggggtgggtgctccaggtgcagccgcttctgtcttgttatgaggaagaggaggtggagacaggagtggctgaggcaggttacttgagtgtgaggccccagaggaactgcgtgaaatcatgagattctggggtcaaatacagctgactccgcctccccagatgctggttatcttctttccaccatcatggagactgttctggctggagtaagctgaagctcaggccctgttccatgttcccgagggcagtgcatgcgcaaggctactgttgtatgtgtacatacttgtgagtgaacacacacctgtgttgtgcacagcctgtcggcatcaaaataggtgtgttcctcccttgcagcagggattctagattgccctcagcttcatcccccttccttccctcccctccttagtactgaccccctgtaatcctggtgaggtacttggcccccacgtacctctgcaggacatgagacttgccttgtaagaatagcttagagctaaatgtccctttaacattagcttaagtaaccagagatctcagacttgaggcgtgcccctaaattctgtaaggctggtcagaaccctcagatccacatcttgtagtgagcaatgagtttctcacattgtgtttaagagtaagtagttttgtgtaacggtcttgctgtcttctgtgggctcctgtattccgggtgctctcccatgatggaggtagttcttttcattatggctagaaggccagctagtctggtctgctgtctccataggccccagcacagtgggcagtttgctttggggctgcgcaaagtgaagctgtgttttactcctcttatccccaaaggtcttaagaatgggtttaggatcaacaattgtcttacagaaccatctgggaccctgagacttcattcttccaggtcaggggacaataagaattcagagttccttccagttcacaggttggacacttctttgggacattgacaggtcttgtccagttcctgccagccatgggcctgatcccagccccacttgtgggtgagatgggaatggaatgtgagtggagaggccagagtggaaagcctgactgacactgggctggatgctctatggtgtaggtactcctccacctttgctctcaggcaccccacctggatgctgtcctgtctctccaagaaggcctcctgttcctagaagagcctatttagggccccagggttttaacttgttctgtcctacctttgtagggctggacctcctctttcccttacaacaagctctgaagccaccgtttgcacagcagttggtaatggtggcttacaggagcagttacccagtgggtgtggcagagttagtcagaacatctcttgtgtcagataacaggctcctctagtggtctggggataactactggggtgtcatataatgataacttacccagttacccacataagggcctctgaggaatgtactgttgctacatctttgagaatggcagagctgaagttgtggaatgatgccctgtaaacacagaggtgctgggctgtaggacatggtgggagtattcaccttcatttcaaagcagaaagaaaacagtgtagggatggccccacccctttcttccaccctgggtgggagggattggacagacctctcctggttagtgtccacagcaaatggaaatgcagatgaagtcatgtcttccatagtttgcccctgctttacttttccctctacagctctgtgcactcagggtggcgctgcaatgggtatgatcaggctcactgccccaccccagtgtgctcaccttgcctcgctgctgcacacacagggcaggggtatgaggcccatacgtctgtttggtcctatgaagctcggtgattttttttttcttttatctctaagtccaccatttaaatactgcattctttatttgggaagaaaacatcatacccggcccaacagtggaaaatggtggggcggacaggctttaggaccagaccagaatttctgtgccttcctggagcttcagcaggttctcccgagagacaccaagcgtttccgcactacacgcaccacccccatcccgcttggcatcccgcatagtcaggcgtctgtagaccgcgttttcttgtctgcctcagccctcccaagcgttctgagtgcacggctacctccccgcccgctcaggcttcccctccccccaatcctccatgcgctcacccaggcactcaccagccgctgtggcctcatcctctaagctcacgcgctccgcctctagcttcggaggcttgggagttgctgaaggcagctatgaaagggcccttgtgcttctttgctggggctgcgcctagtctggctgtacggagaattgcctgccccagctgggctatggctcaggccactctgcaggggatggcagacttgcctacacctcgcctcaatgacgcgccccctccccactttaggactctaacaccaccaccctcccttcaaggcagcagagagggacaaaggactgctccctagatttcctgggtatgggaggccccgggaggtatggggtaggtgggtgggggtgtcaagcagatacctacctccatactgggtcccagtcttggaacatctctgatctgaaagacgggcctagaacatagcccttttgctgaggcctgcttcctttttttgtttttttgtttttttgttttttttttgttttttttttttttttttttgttttttggtttttttgagacagggtttctctgtatagccctggctgtcctggaagtcactttgtagaccaggctggcctcgaactcagaaatccgcctgcctctggcctcctgagtgcttggattaaaggcgtgcaccaccaccgcctggctgaggcctgcttccttgaagtgtgttctctgcctggtttgtgaagacagggagttgatgacagtttctgcctgggactttggaacaaggatttaatctttatccaaatgcttattaggctttatttatttgcaactggttttgaccattggatgggaaaggaaagagctgagcaggtctgtttgtagctctaggcagaggctccaatccaaaagcacagatggcaggctagacttgggggcagtagctaatgtgaccatgtacagtaagggggttgatgtgcctaggagctgctgcttcttatagaggttgttctatcacctacagtggagagtctgactaccatccctctccagacaaacccacgagctgtcttgcttgtctttagcaagctctcagaccctggcaagaccgactcttcgtacctgttggctggtgccttcaagttacctcagctgcagatttagccttcagggtggctcttcacccctttgctggagttgtaagccagagacagagctccaagcatcagtgtcctgaaatccaaacacttgccctacaactcacctcagatctggcaattgacagtatcctggcgtctcttcctttatgccctttcacctcaattagccactaccaggaccttttcagaatgttgtggctttgttttgtcagatgtctttaagatggcttgtcacctgtctcacgtctttccattaccgttcgtatagcatacattatacgaacggtaagagccctacttgaatatcttgaaggtttcagacacacacattcacattccatgatgagtgtgatagaagctttcatagtttccccaagttttcagggtctttaaggcttagtgtagggttctatgtacacatactcatacatactcaaacatgtcagactttcacaatgctagtcttttccaaagggaaagaaagcccatctggtatcctggctctccctgagaacttggggcccccatatgcttgagtgtggccctagttttaaaccagagtgtggagaaatactgctgctctctccaggactgacctcccccccccctcacaggaagtcacctgggcagggacttatgtacaacttcacccacttggatgcattcttggaccttctcatggagaaccagcttctccctggtgagcaatggcccagcgttctcccaccacccgccattctctgtcctggagggtggtgctatctcagcactaactgaaatagttgggtatgatgggacaactactcttgtgtgtttcaggatttgagctcatgggcagtccttctgggtacttcacggactttgatgacaagcagcaggtgtttgaatggaaggacctggtttctctcttggccaggagatacattggtgaatagaagggggaaatcctggggactgtagtgggttgtccccgggaggttctcctccttgatcacccaggccacctcgtggtcttctctgccaaagacatcactattccctagcctgagatgcctgatgggtgagagattcacctgataggggtggggtagggtacttgcttgaagccaggtaatcccattcaagtggaacccctccccccccccacacacacacacaattcatgggtcctaggagataccaggtgggctccatccccaaacctgagagtagagctccctctgcaggtaggtatgggctgacacacgtttccaagtggaactttgagacttggaatgaaccagaccaccatgactttgacaacgtgtccatgaccacacaaggtaggcagcgtttttccagaccctgttgggtgggctgtatgagagggaagcaggacaatcccagaccctcaagaccctcctgccctaggcttcctgaattactatgatgcctgctctgaggggctgcgcattgccagccccactttgaagttgggtggtcctggggattccttccaccccctgccaaggtcaccaatgtgctggagcctcctgggtcactgtgccaatggaaccaacttcttcactggcgaggtgggcgtgcgtctggattacatctccctgcacaagaaggtgtgtggtgctcccacccctccctgcctcctttgagctgagcctgtactgagtgaggtatgtgctggctcagggtgcaggtagctccatcgccatcctggagcaggagatggcagttgtggagcaggtccagcagctcttccctgagttcaaggatacccctatttacaatgacgaggcagaccctctggtgggctggtccctgccacaaccttggagagctgatgtgacttatgcggccctggtggtgaaggtgggtccttgccatcatgcctcctccaacctcaggaggccttccttggtgggggtggggacagtaccagtggccagtgatacaggttccaactgtcttcacatccacaggtcattgcacagcaccagaacctgctgtttgccaacagcagttcctccatgcgctatgtgctcctcagcaatgacaatgccttcctgagctaccacccgtaccctttctcccagcgcacacttactgctcgattccaggtcaacaatactcacccaccccacgtgcagttgctgcgaaagccagtactcacagtcatggggctcatggccctgttgggtgagtaatgaccttgcttctgtatgtgctgagtcacaaagtgaaaaagaccatgtaaagcctggcacatcctgtattgagggaacatgctgggaaggtgcaaaagcatatttcctccagctgctgtgtgagtttcttaggttggttttccaaatttctacctcttcatctcctcccatcctgtgggctgaacagtataacagactcccagtatacaaatggtgggagctagatattagggtaggaagccagatgctaggtatgagagagccaacagcctcagccctctgcttggcttatagatggagaacaactctgggcagaggtctcaaaggctggggctgtgttggacagcaatcatacagtgggtgtcctggccagcacccatcaccctgaaggctccgcagcggcctggagtaccacagtcctcatctacactagtgatgacacccacgcacaccccaaccacagtatccctgtgactcttcgcctgcgtggggtacctcctggcttgggtgagtggggttctgaaagaaggtgggaacccagctgtagtgggcccagggaggcaaaccatggtgtctggttccacagatcttgtctacatagtactctacttagacaatcaactcagcagcccctacagtgcgtggcagcacatgggccagccagtcttcccctctgcagagcagttccgacgtatgcgcatggtggaggtttgtgggcaagtagggagggagggagggagggagggagggagggagggagggaggggtttcttaggtactgagatttgccaaccacgggcccttcattatccccaggaccccgtggctgaggcaccacgcccctttcctgctaggggccgcctgaccctacaccggaagcttccggtgccatcactcctgctggtgcatgtatgcacacgccccttgaagccacctgggcaggcaagtggcagcctcctaccctacctgtgaggctggctagctcagaccttcatagctactccctccttacaggtcagccggctccgtgcactgcccctgacacatggacagctgattttggtctggtcagatgagcgtgtgggctccaagtgcgtgagtggggtggtcctccttttctatgtcatcaccttagtaatcattcatctccctctgctgtcatgtgttctatacacactgtacacacctgcacagaccctctgctgtcatgtgttctatacacactgtacacacctgcacacaccctctgctgtcacgtgttctatacacactgtacacacctgcacagacctctgctgtcgtgtgttctatacacactgtacacacctgcacagaccctctgctgtcatgtgttctatacacactgtacacacctgcacagaccctctgctgtcgtgtgttctatacacactgtacacacctgcacagaccctctgctgttttgtgttctatacacactgtacacacctgcacagaccctctgctgtcgtgtgttctatacacactgtacacacctgcacagaccctctgctgtcgtgtgttctatacacactgtacacacctgcacagaccctctgctgtcgtgtgttctatacacactgtacacacctgcacagaccctctgctgtcatgtgttctatacacactgtacacacctgcacagaccctctgctgtcatgtgttctatacacactgtacacacctgcacagaccctctgctgtcgtgtgttctatacacactgtacacacctgcacagacccacttgtgtctgagttggagatcacctacagtgatagtctccaattccctcagtgtgtcctgtcacaattttgagagtgcccagggaccttggatgtgttagcaagggacctgaagagtatagggttgtgggtccaccctatcccacccatccaggccttcagagtttagctagcaccagcttcagtacagacccatccctcctcaggtgcctgtggacatatgagatccagttttcccagaaaggtgaagagtatgccccaatcaacaggaggccgtctacttttaacctctttgtgttcagcccaggtatgactaaaaccttagtcttggcaattgtactgctggacctcagtacagtatgatgtaggttgggtctggggtttgagaacttcagaagacatatgcttttgtgtctgcagacacagctgtggtctctggctcctaccgagttcgagcattggattactgggcccggccaggccccttctccgaccctgtgacttacctggatgtccctgcctcatgagagccactggctcctagtgacttgtgaatctgtgctgactggtgaatggagtcaaccagtatgagctagactgccattagctaggcagctgactgtcagcttctattgttcttcccctatttccctttaaagtgtctttctctacctcagacttagggtcagtctttgtggctaagcactttataggcccagttggagtgacctttgcccaccttcctccccatgcccagctgttcaaaaagtttaaatgtgggactggaaagatggctcagtagataaagtgcttgctgtgcaggcccagggacttgtgttcagatatctagcactcatgtataggctgggcatggcaatatatgcctattgtcctagtgttggtggaagggacagagacaggccagggttccctggccttccagtctacctgaaactgcaagctccaggttcagtaagaaaccctgttttagaaaaatcaagtagagtgcttggtacacacacacacacacacacacacacacacacagagtctaaatttagtttcttgagcttctgtaatatcaaaaatgaagttatgtacttctgaaatacaatactgcacagagtaagcatcttcattccaacaggaaaaagaaatgacagggaaggatttaagtgaaacaagaccaaagcatagcaagacaaacgttaaatcctgcagctccattctcagcatcggggcccatgatcctgtgatgtgctggacagtctgtgtctgtggtgttgccatttccagccgccatgacctttctcctaggctggtgtcttgggcttcctattgattcgataaaccgcgatgaatgagcagaagcatctgggtagggaagcgttgacttcacttgtattcctacattacagtctatcatcgaaggcagtcaggcaggcacctggaggcaggaagtcatggagaggccatggaggggtgctgcttactcagactatgatcttacacatcccgggatcaccagccaaagggtgggcccccacccacaacggtctggaccctcccacatcaatcactagtttaagaaaacaggcttatctataggtcaatcttgttggggcatttttctcaattgaggttccttcttcccaaatgactctagcttgtaataaactgaaataaagccaccccaatcttgccacacattacctggcctcccaagtcttcctttgaaatctgggtggaagccaacataaccctgtcactgtaactctgatattctaccttctaagccagcatcctgtggatcacagcctactatcagcttgagtggtagttgaggactcctgggtcatccatggctacaataagcatgaagtgcctgaggcttagtcccatgcatttgtggagaatattatgatgatgatatctagtagaggggggaggctgttcacctcaaagggaacaggaagtagagtggggatagaattaagctaaatacttcttcactgacccgctttgtttaactcagccctgcatcctaaagtttctagaatctccccaaacagacctattacctggaaactacctttaaggtgtaagcctgggctgatcttaataggctgatgttccataacttcgtataatgtatgctatacgaagttatctcgagtaactttaaataatgccaattatttaaagttatgtacataactataacggtcctaaggtagcgagctagcgaagaaccctctctcctttagtacaaacccctggtgtgccccaccagagagcctgttggacacacgtgtccttaattcattctgcacatttttcttctctccatcagcacacagaagttcagcatacagaggtttgtgctgaaatgtaggcgtactcccaagctctccccagagtactatcacctactgtccaggaaatgagtctgagtgcagtgctcatatacactgcatggctacatccaaagtcagagttcctctgccctcatgcctcttgaagtgaacgaaatgtgatgaccttctgcagggtgttttttagtcctctgtggaccctaggctggccttggcatcttggctcacctgtcccagagttactactattaagattacaggtgtgtaccaccatgcctgccaattacctctcactttaaataaaatatgacatttcccactaccatgagatcacccacaacaggcttctctggagaatcctgagcttttcagagcttgtctcccaccccttggaaatatgttttactaagccctctgaggcatgtaacttcttgcctaccaagccagtgagcatgaccagcaggttgcattaattttgggagagtgatatcatcaaggcaaacttgaggtgtgctgacagccattatgggaaaagaagactgctcttgatgagacaaagagcactttacagtggagaagctggtgtgtcaggcagccaggcctcagatatagtgggtgttgccctggttatgcatgtaatacccggggggtggggggtggttatgaggatctggagagagacctcctaatctcccactctgtcctggaaactggaaagggacccaaggggtgatctttagaacaagcaagtgtggtctgctggctgatgtccccaaacctcactgaccggtaggccagttttcaggtgacagaactgtagccactcaagagtcattatcaaaccactgtaggagttcaccttccctcttctcggtggcatccagcttcctcctttcgaggctctgtgtctgtaatgtggctcaggtcaggagctaatatgagaccctggagcaacattatgatagtttgtgccagtaaagggtcctgtgggcccacctcgttagcctccatgtccagcagtgctctgcagcctgtagtttgcatggatgtaggtaatttctcaggccctctcaccttgctgatgataccttcttacctcactggtaccttcagtgtcacagacctctgcaggcaatgtggaagtgcttgggtaatatcctttttctagagccagccctgaagcatcctgtctgtgctgtggttgcttccaaaaggctccagatattgtttggtacactcagggtttgtggacagccgtgccgtgagcaattgccattataagatggtgctggcttccattgcgcctaactagtaaacaagccttatgcgcaagtgcaagagtgaattcacgcccagtcactgcccatctcggggtgtagtaatggggtgatgggcgagcaactaatcaggtgctgtcacgccacatcaggtgctgaaacgtcacgctgcgggctatataagcagtgccattttccaggttcggggtcttccttatgttgaagcaataaaagctttgccgtagaaggatccggttgtctgagtgaattcttgccggcgagatactagctcgggcgaga

SEQ ID NO: 13 - DNA, 24 bp, synthetic construct
  misc_feature 1..24: note = Synthetic
  source 1..24: mol_type = other DNA
tgaagcaataacccttgacctaaa

SEQ ID NO: 14 - DNA, 25 bp, synthetic construct
  misc_feature 1..25: note = Synthetic
  source 1..25: mol_type = other DNA
tgagaagcaggaacagcactaggcc

SEQ ID NO: 15 - DNA, 19 bp, synthetic construct
  misc_feature 1..19: note = Synthetic
  source 1..19: mol_type = other DNA
tgccaggacgtctatccaa

SEQ ID NO: 16 - DNA, 23 bp, synthetic construct
  misc_feature 1..23: note = Synthetic
  source 1..23: mol_type = other DNA
aatgtctgtggttcggtacctag

SEQ ID NO: 17 - DNA, 30 bp, synthetic construct
  misc_feature 1..30: note = Synthetic
  source 1..30: mol_type = other DNA
tcacatgtactggaagcaaatgactattgc

SEQ ID NO: 18 - DNA, 21 bp, synthetic construct
  misc_feature 1..21: note = Synthetic
  source 1..21: mol_type = other DNA
gcacaccaaagaggctgaaag

SEQ ID NO: 19 - DNA, 23 bp, synthetic construct
  misc_feature 1..23: note = Synthetic
  source 1..23: mol_type = other DNA
aggccaagattgacagttaccag

SEQ ID NO: 20 - DNA, 27 bp, synthetic construct
  misc_feature 1..27: note = Synthetic
  source 1..27: mol_type = other DNA
atgcagaaactcgagggatctcctacc

SEQ ID NO: 21 - DNA, 21 bp, synthetic construct
  misc_feature 1..21: note = Synthetic
  source 1..21: mol_type = other DNA
ggagtacagggaaggaaacct

SEQ ID NO: 22 - DNA, 24 bp, synthetic construct
  misc_feature 1..24: note = Synthetic
  source 1..24: mol_type = other DNA
ccagccagaatttatatgcagaaa

SEQ ID NO: 23 - DNA, 14 bp, synthetic construct
  misc_feature 1..14: note = Synthetic
  source 1..14: mol_type = other DNA
ctcgagggatctcc

SEQ ID NO: 24 - DNA, 25 bp, synthetic construct
  misc_feature 1..25: note = Synthetic
  source 1..25: mol_type = other DNA
cagtcatagctgtccctcttctctt

SEQ ID NO: 25 - DNA, 19 bp, synthetic construct
  misc_feature 1..19: note = Synthetic
  source 1..19: mol_type = other DNA
gcctccgctgtctgacgat

SEQ ID NO: 26 - DNA, 23 bp, synthetic construct
  misc_feature 1..23: note = Synthetic
  source 1..23: mol_type = other DNA
aagtctgtgtcccttgccatgcg

SEQ ID NO: 27 - DNA, 19 bp, synthetic construct
  misc_feature 1..19: note = Synthetic
  source 1..19: mol_type = other DNA
gctgcctcccgtctgattc

SEQ ID NO: 28 - DNA, 19 bp, synthetic construct
  misc_feature 1..19: note = Synthetic
  source 1..19: mol_type = other DNA
ggtggagaggctattcggc

SEQ ID NO: 29 - DNA, 23 bp, synthetic construct
  misc_feature 1..23: note = Synthetic
  source 1..23: mol_type = other DNA
tgggcacaacagacaatcggctg

SEQ ID NO: 30 - DNA, 17 bp, synthetic construct
  misc_feature 1..17: note = Synthetic
  source 1..17: mol_type = other DNA
gaacacggcggcatcag

SEQ ID NO: 31 - DNA, 21 bp, synthetic construct
  misc_feature 1..21: note = Synthetic
  source 1..21: mol_type = other DNA
tcacgtctttccacctcagtg

SEQ ID NO: 32 - DNA, 23 bp, synthetic construct
  misc_feature 1..23: note = Synthetic
  source 1..23: mol_type = other DNA
tgactgaccagagccctacttga

SEQ ID NO: 33 - DNA, 23 bp, synthetic construct
  misc_feature 1..23: note = Synthetic
  source 1..23: mol_type = other DNA
gtgtgtgtctgaaaccttcaaga

SEQ ID NO: 34 - DNA, 22 bp, synthetic construct
  misc_feature 1..22: note = Synthetic
  source 1..22: mol_type = other DNA
ggctgatgttcctaccttggtt

SEQ ID NO: 35 - DNA, 22 bp, synthetic construct
  misc_feature 1..22: note = Synthetic
  source 1..22: mol_type = other DNA
ctggccacgggaagaaccctct

SEQ ID NO: 36 - DNA, 19 bp, synthetic construct
  misc_feature 1..19: note = Synthetic
  source 1..19: mol_type = other DNA
tgtgtccaacaggctctct

SEQ ID NO: 37 - DNA, 21 bp, synthetic construct
  misc_feature 1..21: note = Synthetic
  source 1..21: mol_type = other DNA
gggcagggacttatgtacaac

SEQ ID NO: 38 - DNA, 25 bp, synthetic construct
  misc_feature 1..25: note = Synthetic
  source 1..25: mol_type = other DNA
tcacccacttggatgcattcttgga

SEQ ID NO: 39 - DNA, 18 bp, synthetic construct
  misc_feature 1..18: note = Synthetic
  source 1..18: mol_type = other DNA
gctcaccagggagaagct

SEQ ID NO: 40 - DNA, 23 bp, synthetic construct
  misc_feature 1..23: note = Synthetic
  source 1..23: mol_type = other DNA
tcccagaaaggtgaagagtatgc

SEQ ID NO: 41 - DNA, 24 bp, synthetic construct
  misc_feature 1..24: note = Synthetic
  source 1..24: mol_type = other DNA
cccaatcaacaggaggccgtctac

SEQ ID NO: 42 - DNA, 21 bp, synthetic construct
  misc_feature 1..21: note = Synthetic
  source 1..21: mol_type = other DNA
gggctgaacacaaagaggtta

SEQ ID NO: 43 - DNA, 21 bp, synthetic construct
  misc_feature 1..21: note = Synthetic
  source 1..21: mol_type = other DNA
gtcacctgtctcacgtctttc

SEQ ID NO: 44 - DNA, 22 bp, synthetic construct
  misc_feature 1..22: note = Synthetic
  source 1..22: mol_type = other DNA
gtgaatgtgtgtgtctgaaacc

SEQ ID NO: 45 - DNA, 21 bp, synthetic construct
  misc_feature 1..21: note = Synthetic
  source 1..21: mol_type = other DNA
agcctgggctgatcttaatag

SEQ ID NO: 46 - DNA, 22 bp, synthetic construct
  misc_feature 1..22: note = Synthetic
  source 1..22: mol_type = other DNA
cgctaccttaggaccgttatag

SEQ ID NO: 47 - DNA, 1127 bp, synthetic construct
  misc_feature 1..1127: note = Synthetic
  source 1..1127: mol_type = other DNA
atatgtcataaaacttatgctaaaatatgtgttataaaacatatgctaacataatttagataaagatgctagattcaggtttccttccctgtactccaaagaagcaggtatcttccagcctccagggcacgcaccttccttccttgcaggacgcatttccacactgtgtgagtgaaccagaagcaggaccatctctacagctgagagcaggccctgctcctgtatggtgactctcatgctcaggggtgactgtttactgccttcacacttggctctaccccaagtccccaaagtcatcttgcttctttatgtatttcctggtttaatactttcctccctgacccgacaccacaggctggtgtttctgtcctggccatgaatggggcaagacatgaatatacctgattgtcttccacatgttgaagccatccagaggtttggttccattagtgcttcccccagccagatctacgagtgtggggagccaatcggtgatgtgcatgagttcccggctcttcacgcctttctgtttcagcaaggggcttgccacgaagcccgttcctcggatgcccccttcccacagggtccccttccttcctcggagtggccagttgttgcctccagacctagtctgcccaccgttatctgaaacacaggtaagccttggcatgagtacatgaaagttagcaaaatggcgtcacttgtgtcacaccatcacaggcaagaacataatgggtgaagctaaggttatgaaaagagggggctctcatgcgcatatgccatttgatgagaacgagctcagaggactttacagaaccacgatcttgagggggcaggggtggaagagggcatgttacctcacgatcttgaggggacaggggtggaagagggcatgttacctcacgatcttgagggggcaggggtggaagagggcatgttacctcacgatcttgagggggcaggggtggaagagggtatgttacctcacgatcttgagggggcaggggtggaagagggcatgttacctcacgatcttgagggggcaggggtggaagagggcatgttacctcacgatcttgagggggcaggggtggaagagggcatgttaccttattcaagaataatcc

SEQ ID NO: 48 - DNA, 1127 bp, synthetic construct
  misc_feature 1..1127: note = Synthetic
  source 1..1127: mol_type = other DNA
ggattattcttgaataaggtaacatgccctcttccacccctgccccctcaagatcgtgaggtaacatgccctcttccacccctgccccctcaagatcgtgaggtaacatgccctcttccacccctgccccctcaagatcgtgaggtaacataccctcttccacccctgccccctcaagatcgtgaggtaacatgccctcttccacccctgccccctcaagatcgtgaggtaacatgccctcttccacccctgtcccctcaagatcgtgaggtaacatgccctcttccacccctgccccctcaagatcgtggttctgtaaagtcctctgagctcgttctcatcaaatggcatatgcgcatgagagccccctcttttcataaccttagcttcacccattatgttcttgcctgtgatggtgtgacacaagtgacgccattttgctaactttcatgtactcatgccaaggcttacctgtgtttcagataacggtgggcagactaggtctggaggcaacaactggccactccgaggaaggaaggggaccctgtgggaagggggcatccgaggaacgggcttcgtggcaagccccttgctgaaacagaaaggcgtgaagagccgggaactcatgcacatcaccgattggctccccacactcgtagatctggctgggggaagcactaatggaaccaaacctctggatggcttcaacatgtggaagacaatcaggtatattcatgtcttgccccattcatggccaggacagaaacaccagcctgtggtgtcgggtcagggaggaaagtattaaaccaggaaatacataaagaagcaagatgactttggggacttggggtagagccaagtgtgaaggcagtaaacagtcacccctgagcatgagagtcaccatacaggagcagggcctgctctcagctgtagagatggtcctgcttctggttcactcacacagtgtggaaatgcgtcctgcaaggaaggaaggtgcgtgccctggaggctggaagatacctgcttctttggagtacagggaaggaaacctgaatctagcatctttatctaaattatgttagcatatgttttataacacatattttagcataagttttatgacatat

SEQ ID NO: 49 - DNA, 5810 bp, synthetic construct
  misc_feature 1..5810: note = Synthetic
  source 1..5810: mol_type = other DNA
ggaacatcagcctattaagatcagcccaggcttacaccttaaaggtagtttccaggtaataggtctgtttggggagattctagaaactttaggatgcagggctgagttaaacaaagcgggtcagtgaagaagtatttagcttaattctatccccactctacttcctgttccctttgaggtgaacagcctcccccctctactagatatcatcatcataatattctccacaaatgcatgggactaagcctcaggcacttcatgcttattgtagccatggatgacccaggagtcctcaactaccactcaagctgatagtaggctgtgatccacaggatgctggcttagaaggtagaatatcagagttacagtgacagggttatgttggcttccacccagatttcaaaggaagacttgggaggccaggtaatgtgtggcaagattggggtggctttatttcagtttattacaagctagagtcatttgggaagaaggaacctcaattgagaaaaatgccccaacaagattgacctatagataagcctgttttcttaaactagtgattgatgtgggagggtccagaccgttgtgggtgggggcccaccctttggctggtgatcccgggatgtgtaagatcatagtctgagtaagcagcacccctccatggcctctccatgacttcctgcctccaggtgcctgcctgactgccttcgatgatagactgtaatgtaggaatacaagtgaagtcaacgcttccctacccagatgcttctgctcattcatcgcggtttatcgaatcaataggaagcccaagacaccagcctaggagaaaggtcatggcggctggaaatggcaacaccacagacacagactgtccagcacatcacaggatcatgggccccgatgctgagaatggagctgcaggatttaacgtttgtcttgctatgctttggtcttgtttcacttaaatccttccctgtcatttctttttcctgttggaatgaagatgcttactctgtgcagtattgtatttcagaagtacataacttcatttttgatattacagaagctcaagaaactaaatttagactctgtgtgtgtgtgtgtgtgtgtgtgtgtgtgtgtaccaagcactctacttgatttttctaaaacagggtttcttactgaacctggagcttgcagtttcaggtagactggaaggccagggaaccctggcctgtctctgtcccttccaccaacactaggacaataggcatatattgccatgcccagcctatacatgagtgctagatatctgaacacaagtccctgggcctgcacagcaagcactttatctactgagccatctttccagtcccacatttaaactttttgaacagctgggcatggggaggaaggtgggcaaaggtcactccaactgggcctataaagtgcttagccacaaagactgaccctaagtctgaggtagagaaagacactttaaagggaaataggggaagaacaatagaagctgacagtcagctgcctagctaatggcagtctagctcatactggttgactccattcaccagtcagcacagattcacaagtcactaggagccagtggctctcatgaggcagggacatccaggtaagtcacagggtcggagaaggggcctggccgggcccagtaatccaatgctcgaactcggtaggagccagagaccacagctgtgtctgcagacacaaaagcatatgtcttctgaagttctcaaaccccagacccaacctacatcatactgtactgaggtccagcagtacaattgccaagactaaggttttagtcatacctgggctgaacacaaagaggttaaaagtagacggcctcctgttgattggggcatactcttcacctttctgggaaaactggatctcatatgtccacaggcacctgaggagggatgggtctgtactgaagctggtgctagctaaactctgaaggcctggatgggtgggatagggtggacccacaaccctatactcttcaggtcccttgctaacacatccaaggtccctgggcactctcaaaattgtgacaggacacactgagggaattggagactatcactgtaggtgatctccaactcagacacaagtgggtctgtgcaggtgtgtacagtgtgtatagaacacacgacagcagagggtctgtgcaggtgtgtacagtgtgtatagaacacatgacagcagagggtctgtgcaggtgtgtacagtgtgtatagaacacatgacagcagagggtctgtgcaggtgtgtacagtgtgtatagaacacacgacagcagagggtctgtgcaggtgtgtacagtgtgtatagaacacacgacagcagagggtctgtgcaggtgtgtacagtgtgtatagaacacacgacagcagagggtctgtgcaggtgtgtacagtgtgtatagaacacaaaacagcagagggtctgtgcaggtgtgtacagtgtgtatagaacacacgacagcagagggtctgtgcaggtgtgtacagtgtgtatagaacacatgacagcagagggtctgtgcaggtgtgtacagtgtgtatagaacacacgacagcagaggtctgtgcaggtgtgtacagtgtgtatagaacacgtgacagcagagggtgtgtgcaggtgtgtacagtgtgtatagaacacatgacagcagagggtctgtgcaggtgtgtacagtgtgtatagaacacatgacagcagagggagatgaatgattactaaggtgatgacatagaaaaggaggaccaccccactcacgcacttggagcccacacgctcatctgaccagaccaaaatcagctgtccatgtgtcaggggcagtgcacggagccggctgacctgtaaggagggagtagctatgaaggtctgagctagccagcctcacaggtagggtaggaggctgccacttgcctgcccaggtggcttcaaggggcgtgtgcatacatgcaccagcaggagtgatggcaccggaagcttccggtgtagggtcaggcggcccctagcaggaaaggggcgtggtgcctcagccacggggtcctggggataatgaagggcccgtggttggcaaatctcagtacctaagaaacccctccctccctccctccctccctccctccctccctccctccctacttgcccacaaacctccaccatgcgcatacgtcggaactgctctgcagaggggaagactggctggcccatgtgctgccacgcactgtaggggctgctgagttgattgtctaagtagagtactatgtagacaagatctgtggaaccagacaccatggtttgcctccctgggcccactacagctgggttcccaccttctttcagaaccccactcacccaagccaggaggtaccccacgcaggcgaagagtcacagggatactgtggttggggtgtgcgtgggtgtcatcactagtgtagatgaggactgtggtactccaggccgctgcggagccttcagggtgatgggtgctggccaggacacccactgtatgattgctgtccaacacagccccagcctttgagacctctgcccagagttgttctccatctataagccaagcagagggctgaggctgttggctctctcatacctagcatctggcttcctaccctaatatctagctcccaccatttgtatactgggagtctgttatactgttcagcccacaggatgggaggagatgaagaggtagaaatttggaaaaccaacctaagaaactcacacagcagctggaggaaatatgcttttgcaccttcccagcatgttccctcaatacaggatgtgccaggctttacatggtctttttcactttgtgactcagcacatacagaagcaaggtcattactcacccaacagggccatgagccccatgactgtgagtactggctttcgcagcaactgcacgtggggtgggtgagtattgttgacctggaatcgagcagtaagtgtgcgctgggagaaagggtacgggtggtagctcaggaaggcattgtcattgctgaggagcacatagcgcatggaggaactgctgttggcaaacagcaggttctggtgctgtgcaatgacctgtggatgtgaagacagttggaacctgtatcactggccactggtactgtccccacccccaccaaggaaggcctcctgaggttggaggaggcatgatggcaaggacccaccttcaccaccagggccgcataagtcacatcagctctccaaggttgtggcagggaccagcccaccagagggtctgcctcgtcattgtaaataggggtatccttgaactcagggaagagctgctggacctgctccacaactgccatctcctgctccaggatggcgatggagctacctgcaccctgagccagcacatacctcactcagtacaggctcagctcaaaggaggcagggaggggtgggagcaccacacaccttcttgtgcagggagatgtaatccagacgcacgcccacctcgccagtgaagaagttggttccattggcacagtgacccaggaggctccagcacattggtgaccttggcagggggtggaaggaatccccaggaccacccaacttcaaagtggggctggcaatgcgcagcccctcagagcaggcatcatagtaattcaggaagcctagggcaggagggtcttgagggtctgggattgtcctgcttccctctcatacagcccacccaacagggtctggaaaaacgctgcctaccttgtgtggtcatggacacgttgtcaaagtcatggtggtctggttcattccaagtctcaaagttccacttggaaacgtgtgtcagcccatacctacctgcagagggagctctactctcaggtttggggatggagcccacctggtatctcctaggacccatgaattgtgtgtgtgtgtggggggggggaggggttccacttgaatgggattacctggcttcaagcaagtaccctaccccacccctatcaggtgaatctctcacccatcaggcatctcaggctagggaatagtgatgtctttggcagagaagaccacgaggtggcctgggtgatcaaggaggagaacctcccggggacaacccactacagtccccaggatttcccccttctattcaccaatgtatctcctggccaagagagaaaccaggtccttccattcaaacacctgctgcttgtcatcaaagtccgtgaagtacccagaaggactgcccatgagctcaaatcctgaaacacacaagagtagttgtcccatcatacccaactatttcagttagtgctgagatagcaccaccctccaggacagagaatggcgggtggtgggagaacgctgggccattgctcaccagggagaagctggttctccatgagaaggtccaagaatgcatccaagtgggtgaagttgtacataagtccctgcccaggtgacttcctgtgaggggggggggaggtcagtcctggagagagcagcagtatttctccacactctggtttaaaactagggccacactcaagcatatgggggccccaagttctcagggagagccaggataccagatgggctttctttccctttggaaaagactagcattgtgaaagtctgacatgtttgagtatgtatgagtatgtgtacatagaaccctacactaagccttaaagaccctgaaaacttggggaaactatgaaagcttctatcacactcatcatggaatgtgaatgtgtgtgtctgaaaccttcaagatattcaagtagggctct

SEQ ID NO: 50 - DNA, 5810 bp, synthetic construct
  misc_feature 1..5810: note = Synthetic
  source 1..5810: mol_type = other DNA
agagccctacttgaatatcttgaaggtttcagacacacacattcacattccatgatgagtgtgatagaagctttcatagtttccccaagttttcagggtctttaaggcttagtgtagggttctatgtacacatactcatacatactcaaacatgtcagactttcacaatgctagtcttttccaaagggaaagaaagcccatctggtatcctggctctccctgagaacttggggcccccatatgcttgagtgtggccctagttttaaaccagagtgtggagaaatactgctgctctctccaggactgacctcccccccccctcacaggaagtcacctgggcagggacttatgtacaacttcacccacttggatgcattcttggaccttctcatggagaaccagcttctccctggtgagcaatggcccagcgttctcccaccacccgccattctctgtcctggagggtggtgctatctcagcactaactgaaatagttgggtatgatgggacaactactcttgtgtgtttcaggatttgagctcatgggcagtccttctgggtacttcacggactttgatgacaagcagcaggtgtttgaatggaaggacctggtttctctcttggccaggagatacattggtgaatagaagggggaaatcctggggactgtagtgggttgtccccgggaggttctcctccttgatcacccaggccacctcgtggtcttctctgccaaagacatcactattccctagcctgagatgcctgatgggtgagagattcacctgataggggtggggtagggtacttgcttgaagccaggtaatcccattcaagtggaacccctccccccccccacacacacacacaattcatgggtcctaggagataccaggtgggctccatccccaaacctgagagtagagctccctctgcaggtaggtatgggctgacacacgtttccaagtggaactttgagacttggaatgaaccagaccaccatgactttgacaacgtgtccatgaccacacaaggtaggcagcgtttttccagaccctgttgggtgggctgtatgagagggaagcaggacaatcccagaccctcaagaccctcctgccctaggcttcctgaattactatgatgcctgctctgaggggctgcgcattgccagccccactttgaagttgggtggtcctggggattccttccaccccctgccaaggtcaccaatgtgctggagcctcctgggtcactgtgccaatggaaccaacttcttcactggcgaggtgggcgtgcgtctggattacatctccctgcacaagaaggtgtgtggtgctcccacccctccctgcctcctttgagctgagcctgtactgagtgaggtatgtgctggctcagggtgcaggtagctccatcgccatcctggagcaggagatggcagttgtggagcaggtccagcagctcttccctgagttcaaggatacccctatttacaatgacgaggcagaccctctggtgggctggtccctgccacaaccttggagagctgatgtgacttatgcggccctggtggtgaaggtgggtccttgccatcatgcctcctccaacctcaggaggccttccttggtgggggtggggacagtaccagtggccagtgatacaggttccaactgtcttcacatccacaggtcattgcacagcaccagaacctgctgtttgccaacagcagttcctccatgcgctatgtgctcctcagcaatgacaatgccttcctgagctaccacccgtaccctttctcccagcgcacacttactgctcgattccaggtcaacaatactcacccaccccacgtgcagttgctgcgaaagccagtactcacagtcatggggctcatggccctgttgggtgagtaatgaccttgcttctgtatgtgctgagtcacaaagtgaaaaagaccatgtaaagcctggcacatcctgtattgagggaacatgctgggaaggtgcaaaagcatatttcctccagctgctgtgtgagtttcttaggttggttttccaaatttctacctcttcatctcctcccatcctgtgggctgaacagtataacagactcccagtatacaaatggtgggagctagatattagggtaggaagccagatgctaggtatgagagagccaacagcctcagccctctgcttggcttatagatggagaacaactctgggcagaggtctcaaaggctggggctgtgttggacagcaatcatacagtgggtgtcctggccagcacccatcaccctgaaggctccgcagcggcctggagtaccacagtcctcatctacactagtgatgacacccacgcacaccccaaccacagtatccctgtgactcttcgcctgcgtggggtacctcctggcttgggtgagtggggttctgaaagaaggtgggaacccagctgtagtgggcccagggaggcaaaccatggtgtctggttccacagatcttgtctacatagtactctacttagacaatcaactcagcagcccctacagtgcgtggcagcacatgggccagccagtcttcccctctgcagagcagttccgacgtatgcgcatggtggaggtttgtgggcaagtagggagggagggagggagggagggagggagggagggagggaggggtttcttaggtactgagatttgccaaccacgggcccttcattatccccaggaccccgtggctgaggcaccacgcccctttcctgctaggggccgcctgaccctacaccggaagcttccggtgccatcactcctgctggtgcatgtatgcacacgccccttgaagccacctgggcaggcaagtggcagcctcctaccctacctgtgaggctggctagctcagaccttcatagctactccctccttacaggtcagccggctccgtgcactgcccctgacacatggacagctgattttggtctggtcagatgagcgtgtgggctccaagtgcgtgagtggggtggtcctccttttctatgtcatcaccttagtaatcattcatctccctctgctgtcatgtgttctatacacactgtacacacctgcacagaccctctgctgtcatgtgttctatacacactgtacacacctgcacacaccctctgctgtcacgtgttctatacacactgtacacacctgcacagacctctgctgtcgtgtgttctatacacactgtacacacctgcacagaccctctgctgtcatgtgttctatacacactgtacacacctgcacagaccctctgctgtcgtgtgttctatacacactgtacacacctgcacagaccctctgctgttttgtgttctatacacactgtacacacctgcacagaccctctgctgtcgtgtgttctatacacactgtacacacctgcacagaccctctgctgtcgtgtgttctatacacactgtacacacctgcacagaccctctgctgtcgtgtgttctatacacactgtacacacctgcacagaccctctgctgtcatgtgttctatacacactgtacacacctgcacagaccctctgctgtcatgtgttctatacacactgtacacacctgcacagaccctctgctgtcgtgtgttctatacacactgtacacacctgcacagacccacttgtgtctgagttggagatcacctacagtgatagtctccaattccctcagtgtgtcctgtcacaattttgagagtgcccagggaccttggatgtgttagcaagggacctgaagagtatagggttgtgggtccaccctatcccacccatccaggccttcagagtttagctagcaccagcttcagtacagacccatccctcctcaggtgcctgtggacatatgagatccagttttcccagaaaggtgaagagtatgccccaatcaacaggaggccgtctacttttaacctctttgtgttcagcccaggtatgactaaaaccttagtcttggcaattgtactgctggacctcagtacagtatgatgtaggttgggtctggggtttgagaacttcagaagacatatgcttttgtgtctgcagacacagctgtggtctctggctcctaccgagttcgagcattggattactgggcccggccaggccccttctccgaccctgtgacttacctggatgtccctgcctcatgagagccactggctcctagtgacttgtgaatctgtgctgactggtgaatggagtcaaccagtatgagctagactgccattagctaggcagctgactgtcagcttctattgttcttcccctatttccctttaaagtgtctttctctacctcagacttagggtcagtctttgtggctaagcactttataggcccagttggagtgacctttgcccaccttcctccccatgcccagctgttcaaaaagtttaaatgtgggactggaaagatggctcagtagataaagtgcttgctgtgcaggcccagggacttgtgttcagatatctagcactcatgtataggctgggcatggcaatatatgcctattgtcctagtgttggtggaagggacagagacaggccagggttccctggccttccagtctacctgaaactgcaagctccaggttcagtaagaaaccctgttttagaaaaatcaagtagagtgcttggtacacacacacacacacacacacacacacacacagagtctaaatttagtttcttgagcttctgtaatatcaaaaatgaagttatgtacttctgaaatacaatactgcacagagtaagcatcttcattccaacaggaaaaagaaatgacagggaaggatttaagtgaaacaagaccaaagcatagcaagacaaacgttaaatcctgcagctccattctcagcatcggggcccatgatcctgtgatgtgctggacagtctgtgtctgtggtgttgccatttccagccgccatgacctttctcctaggctggtgtcttgggcttcctattgattcgataaaccgcgatgaatgagcagaagcatctgggtagggaagcgttgacttcacttgtattcctacattacagtctatcatcgaaggcagtcaggcaggcacctggaggcaggaagtcatggagaggccatggaggggtgctgcttactcagactatgatcttacacatcccgggatcaccagccaaagggtgggcccccacccacaacggtctggaccctcccacatcaatcactagtttaagaaaacaggcttatctataggtcaatcttgttggggcatttttctcaattgaggttccttcttcccaaatgactctagcttgtaataaactgaaataaagccaccccaatcttgccacacattacctggcctcccaagtcttcctttgaaatctgggtggaagccaacataaccctgtcactgtaactctgatattctaccttctaagccagcatcctgtggatcacagcctactatcagcttgagtggtagttgaggactcctgggtcatccatggctacaataagcatgaagtgcctgaggcttagtcccatgcatttgtggagaatattatgatgatgatatctagtagaggggggaggctgttcacctcaaagggaacaggaagtagagtggggatagaattaagctaaatacttcttcactgacccgctttgtttaactcagccctgcatcctaaagtttctagaatctccccaaacagacctattacctggaaactacctttaaggtgtaagcctgggctgatcttaataggctgatgttcc

SEQ ID NO: 51 - DNA, 20 bp, synthetic construct
  misc_feature 1..20: note = Synthetic
  source 1..20: mol_type = other DNA
catggccttccgtgttccta

SEQ ID NO: 52 - DNA, 22 bp, synthetic construct
  misc_feature 1..22: note = Synthetic
  source 1..22: mol_type = other DNA
cctgcttcaccaccttcttgat

SEQ ID NO: 53 - DNA, 23 bp, synthetic construct
  misc_feature 1..23: note = Synthetic
  source 1..23: mol_type = other DNA
ccaaacctctggatggcttcaac

SEQ ID NO: 54 - DNA, 24 bp, synthetic construct
  misc_feature 1..24: note = Synthetic
  source 1..24: mol_type = other DNA
gtcctgatcgatgttgtgtagcag

SEQ ID NO: 55 - DNA, 28 bp, synthetic construct
  misc_feature 1..28: note = Synthetic
  source 1..28: mol_type = other DNA
aagacaatcagtgaaggacacccatccc

SEQ ID NO: 56 - DNA, 19 bp, synthetic construct
  misc_feature 1..19: note = Synthetic
  source 1..19: mol_type = other DNA
tgcccagaacatcatccct

SEQ ID NO: 57 - DNA, 18 bp, synthetic construct
  misc_feature 1..18: note = Synthetic
  source 1..18: mol_type = other DNA
ggaggccatgccagtgag

SEQ ID NO: 58 - DNA, 23 bp, synthetic construct
  misc_feature 1..23: note = Synthetic
  source 1..23: mol_type = other DNA
atccactggtgctgccaaggctg

We claim:

1. A non-human animal comprising in its genome a reverse-conditional null endogenous lysosomal storage disease gene, wherein the reverse-conditional null endogenous lysosomal storage disease gene is a null endogenous lysosomal storage disease gene that is converted to a functional endogenous lysosomal storage disease gene upon treatment with a recombinase.

2. The non-human animal of claim 1, wherein a critical region of the endogenous lysosomal storage disease gene is inverted and flanked by recombinase recognition sites in the reverse-conditional null endogenous lysosomal storage disease gene, wherein the recombinase recognition sites are oriented such that the critical region is reinverted upon treatment with the recombinase.

3. The non-human animal of claim 2, wherein the critical region comprises a coding sequence of the endogenous lysosomal storage disease gene.

4. The non-human animal of claim 2 or 3, wherein the recombinase is a Cre recombinase.

5. The non-human animal of claim 4, wherein the recombinase recognition sites comprise a lox71 site and a lox66 site.

6. The non-human animal of any one of claims 2-5, wherein the non-human animal further comprises a genomically integrated recombinase expression cassette encoding the recombinase.

7. The non-human animal of claim 6, wherein the genomically integrated recombinase expression cassette comprises a recombinase coding sequence operably linked to a tissue-specific promoter.

8. The non-human animal of claim 6 or 7, wherein the recombinase is inducible.

9. The non-human animal of claim 8, wherein the recombinase is inducible upon treatment with tamoxifen.

10. The non-human animal of any preceding claim, wherein the reverse-conditional null endogenous lysosomal storage disease gene comprises a selection cassette or a reporter gene flanked by recombinase recognition sites for a second recombinase.

11. The non-human animal of claim 10, wherein the reverse-conditional null endogenous lysosomal storage disease gene comprises the selection cassette, wherein the selection cassette is a self-deleting selection cassette.

12. The non-human animal of any one of claims 1-9, wherein the non-human animal does not comprise a selection cassette or a reporter gene.

13. The non-human animal of any preceding claim, wherein the non-human animal comprises the reverse-conditional null endogenous lysosomal storage disease gene in its germline.

14. The non-human animal of any preceding claim, wherein the non-human animal is a mammal.

15. The non-human animal of any preceding claim, wherein the non-human animal is a rodent.

16. The non-human animal of any preceding claim, wherein the non-human animal is a mouse or a rat.

17. The non-human animal of claim 16, wherein the non-human animal is the mouse.

18. The non-human animal of any preceding claim, wherein the lysosomal storage disease gene is a mucopolysaccharidosis gene.

19. The method of any preceding claim, wherein the lysosomal storage disease gene is an Arsb gene.

20. The non-human animal of claim 19, wherein a critical region of the endogenous Arsb gene is inverted and flanked by recombinase recognition sites in the reverse-conditional null endogenous Arsb gene, wherein the recombinase recognition sites are oriented such that the critical region is reinverted upon treatment with the recombinase.

21. The non-human animal of claim 20, wherein the critical region comprises exon 5 of the endogenous Arsb gene.

22. The non-human animal of any one of claims 19-21, wherein the non-human animal displays one or more phenotypes associated with mucopolysaccharidosis VI.

23. The non-human animal of claim 22, wherein the non-human animal displays one or more skeletal phenotypes associated with mucopolysaccharidosis VI.

24. The non-human animal of any one of claims 19-23, wherein the non-human animal displays one or more or all of the following relative to a wild type non-human animal:
(a) increased accumulation of glycosaminoglycans in the liver;
(b) increased accumulation of glycosaminoglycans in the heart;
(c) increased accumulation of glycosaminoglycans in the kidney;
(d) decreased tibia length;
(e) decreased spinal column length;
(f) increased tibial growth plate width; and
(g) decreased cranial length:width ratio.

25. The non-human animal of any one of claims 19-24, wherein the non-human animal displays all of the following relative to the wild type non-human animal:
(a) increased accumulation of glycosaminoglycans in the liver;
(b) increased accumulation of glycosaminoglycans in the heart;
(c) increased accumulation of glycosaminoglycans in the kidney;
(d) decreased tibia length;
(e) decreased spinal column length;
(f) increased tibial growth plate width; and
(g) decreased cranial length:width ratio.

26. The non-human animal of claim 19, wherein a region comprising exon 5 of the endogenous Arsb gene is inverted and flanked by recombinase recognition sites in the reverse-conditional null endogenous Arsb gene,
wherein the recombinase recognition sites are oriented such that the region is reinverted upon treatment with the recombinase,
wherein the recombinase is a Cre recombinase, and the recombinase recognition sites comprise a lox71 site and a lox66 site,
wherein the non-human animal comprises the reverse-conditional null endogenous Arsb gene in its germline,
wherein the non-human animal is a mouse, and
wherein the non-human animal displays one or more phenotypes associated with mucopolysaccharidosis VI.

27. The non-human animal of claim 26, wherein the one or more phenotypes comprise one or more or all of the following relative to a wild type non-human animal:
(a) increased accumulation of glycosaminoglycans in the liver;
(b) increased accumulation of glycosaminoglycans in the heart;
(c) increased accumulation of glycosaminoglycans in the kidney;
(d) decreased tibia length;
(e) decreased spinal column length;
(f) increased tibial growth plate width; and
(g) decreased cranial length:width ratio.

28. The non-human animal of claim 27, wherein the non-human animal displays the decreased tibia length, wherein the decreased tibia length is rescuable within one month after treatment with the recombinase at post-natal day 7 or earlier but is not rescuable within one month after treatment with the recombinase at post-natal day 21 or later or at 8 weeks after birth or later.

29. The non-human animal of claim 27, wherein the non-human animal displays the decreased spinal column length, wherein the decreased spinal column length is rescuable within one month after treatment with the recombinase at post-natal day 7 or earlier but is not rescuable within one month after treatment with the recombinase at post-natal day 21 or later or at 8 weeks after birth or later.

30. The non-human animal of claim 27, wherein the non-human animal displays the increased tibial growth plate width, wherein the increased tibial growth plate width is rescuable within one month after treatment with the recombinase at post-natal day 7 or earlier but is not rescuable within one month after treatment with the recombinase at post-natal day 21 or later or at 8 weeks after birth or later.

31. The non-human animal of claim 27, wherein the non-human animal displays the decreased cranial length:width ratio, wherein the decreased cranial length:width ratio is rescuable within one month after treatment with the recombinase at post-natal day 7 or earlier but is not rescuable within one month after treatment with the recombinase at post-natal day 21 or later or at 8 weeks after birth or later.

32. The non-human animal of any one of claims 19-31, wherein the reverse-conditional null endogenous Arsb gene comprises the sequence set forth in SEQ ID NO: 7, 8, or 47.

33. The non-human animal of any one of claims 19-32, wherein upon treatment the reverse-conditional null endogenous Arsb gene comprises the sequence set forth in SEQ ID NO: 9 or 48.

34. The method of any one of claims 1-18, wherein the lysosomal storage disease gene is an Idua gene.

35. The non-human animal of claim 34, wherein a critical region of the endogenous Idua gene is inverted and flanked by recombinase recognition sites in the reverse-conditional null endogenous Idua gene, wherein the recombinase recognition sites are oriented such that the critical region is reinverted upon treatment with the recombinase.

36. The non-human animal of claim 35, wherein the critical region comprises a region from exon 2 to the stop codon of the endogenous Idua gene.

37. The non-human animal of any one of claims 34-36, wherein the non-human animal displays one or more phenotypes associated with mucopolysaccharidosis I.

38. The non-human animal of claim 37, wherein the non-human animal displays one or more skeletal phenotypes associated with mucopolysaccharidosis I.

39. The non-human animal of claim 37, wherein the non-human animal displays one or more neurological phenotypes associated with mucopolysaccharidosis I.

40. The non-human animal of claim 37, wherein the non-human animal displays one or more skeletal phenotypes associated with mucopolysaccharidosis I and one or more neurological phenotypes associated with mucopolysaccharidosis I.

41. The non-human animal of any one of claims 34-40, wherein the non-human animal displays one or more or all of the following relative to a wild type non-human animal:
(a) increased accumulation of glycosaminoglycans in the liver;
(b) increased accumulation of glycosaminoglycans in the heart;
(c) increased accumulation of glycosaminoglycans in the kidney;
(d) decreased tibia length;
(e) decreased spinal column length;
(f) decreased ribcage width; and
(g) decreased cranial length:width ratio.

42. The non-human animal of any one of claims 34-41, wherein the non-human animal displays all of the following relative to the wild type non-human animal:
(a) increased accumulation of glycosaminoglycans in the liver;
(b) increased accumulation of glycosaminoglycans in the heart;
(c) increased accumulation of glycosaminoglycans in the kidney;
(d) decreased tibia length;
(e) decreased spinal column length;
(f) decreased ribcage width; and
(g) decreased cranial length:width ratio.

43. The non-human animal of any one of claims 34-42, wherein the non-human animal displays one or more or all of the following relative to a wild type non-human animal:
(a) decreased exploratory behavior;
(b) decreased anxiety-related behavior;
(c) impaired long-term memory retention; and
(d) increased escape latency.

44. The non-human animal of any one of claims 34-43, wherein the non-human animal displays all of the following relative to a wild type non-human animal:
(a) decreased exploratory behavior;
(b) decreased anxiety-related behavior;
(c) impaired long-term memory retention; and
(d) increased escape latency.

45. The non-human animal of claim 34, wherein a region comprising exon 2 to the stop codon of the endogenous Idua gene is inverted and flanked by recombinase recognition sites in the reverse-conditional null endogenous Idua gene,
wherein the recombinase recognition sites are oriented such that the region is reinverted upon treatment with the recombinase,
wherein the recombinase is a Cre recombinase, and the recombinase recognition sites comprise a lox71 site and a lox66 site,
wherein the non-human animal comprises the reverse-conditional null endogenous Idua gene in its germline,
wherein the non-human animal is a mouse, and
wherein the non-human animal displays one or more phenotypes associated with mucopolysaccharidosis I.

46. The non-human animal of claim 45, wherein the non-human animal displays one or more skeletal phenotypes associated with mucopolysaccharidosis I.

47. The non-human animal of claim 45, wherein the non-human animal displays one or more neurological phenotypes associated with mucopolysaccharidosis I.

48. The non-human animal of claim 45, wherein the non-human animal displays one or more skeletal phenotypes associated with mucopolysaccharidosis I and one or more neurological phenotypes associated with mucopolysaccharidosis I.

49. The non-human animal of any one of claims 45-48, wherein the non-human animal displays one or more or all of the following relative to a wild type non-human animal:
(a) increased accumulation of glycosaminoglycans in the liver;
(b) increased accumulation of glycosaminoglycans in the heart;
(c) increased accumulation of glycosaminoglycans in the kidney;
(d) decreased tibia length;
(e) decreased spinal column length;
(f) decreased ribcage width; and
(g) decreased cranial length:width ratio.

50. The non-human animal of any one of claims 45-49, wherein the non-human animal displays one or more or all of the following relative to a wild type non-human animal:
(a) decreased exploratory behavior;
(b) decreased anxiety-related behavior;
(c) impaired long-term memory retention; and
(d) increased escape latency.

51. The non-human animal of any one of claims 34-50, wherein the reverse-conditional null endogenous Idua gene comprises the sequence set forth in SEQ ID NO: 10, 11, or 49.

52. The non-human animal of any one of claims 34-51, wherein upon treatment the reverse-conditional null endogenous Idua gene comprises the sequence set forth in SEQ ID NO: 12 or 50.

53. A non-human animal cell comprising in its genome a reverse-conditional null endogenous lysosomal storage disease gene, wherein the reverse-conditional null endogenous lysosomal storage disease gene is a null endogenous lysosomal storage disease gene that is converted to a functional endogenous lysosomal storage disease gene upon treatment with a recombinase.

54. A non-human animal genome comprising a reverse-conditional null endogenous lysosomal storage disease gene, wherein the reverse-conditional null endogenous lysosomal storage disease gene is a null endogenous lysosomal storage disease gene that is converted to a functional endogenous lysosomal storage disease gene upon treatment with a recombinase.

55. A nucleic acid comprising a reverse-conditional null endogenous lysosomal storage disease gene, wherein the reverse-conditional null endogenous lysosomal storage disease gene is a null endogenous lysosomal storage disease gene that is converted to a functional endogenous lysosomal storage disease gene upon treatment with a recombinase.

56. A reverse-conditional null endogenous lysosomal storage disease gene,
wherein the reverse-conditional null endogenous lysosomal storage disease gene is a null endogenous lysosomal storage disease gene that is converted to a functional endogenous lysosomal storage disease gene upon treatment with a recombinase.

57. A method of assessing reversibility of a phenotype of a lysosomal storage disease, comprising:
(a) treating a non-human animal of any one of claims 1-52 with the recombinase at a selected time point after birth or treating the non-human animal with a candidate therapeutic agent at the selected time point after birth; and
(b) assessing the phenotype of the lysosomal storage disease after a defined time period post-treatment relative to a control non-human animal.

58. The method of claim 57, wherein step (a) comprises treating the non-human animal with the candidate therapeutic agent at the selected time point after birth.

59. The method of claim 58, wherein the candidate therapeutic agent is a protein encoded by the endogenous lysosomal storage disease gene or a nucleic acid encoding the protein.

60. The method of claim 58 or 59, wherein the control non-human animal is the non-human animal in step (a) prior to treatment with the candidate therapeutic agent.

61. The method of any one of claims 58-60, wherein the control non-human animal is a second non-human animal comprising the reverse-conditional null endogenous lysosomal storage disease gene, wherein the second non-human animal has not been treated with the candidate therapeutic agent.

62. The method of claim 61, wherein the second non-human animal is the same age as the non-human animal in step (a).

63. The method of claim 57, wherein step (a) comprises treating the non-human animal with the recombinase at the selected time point after birth.

64. The method of claim 63, wherein the non-human animal further comprises a genomically integrated recombinase expression cassette encoding the recombinase, wherein the recombinase is inducible, and step (a) comprises inducing the recombinase.

65. The method of claim 64, wherein the recombinase is inducible upon treatment with tamoxifen, and step (a) comprises treating the non-human animal with tamoxifen.

66. The method of any one of claims 63-65, wherein the control non-human animal is the non-human animal in step (a) prior to treatment with the recombinase.

67. The method of any one of claims 63-65, wherein the control non-human animal is a second non-human animal comprising the reverse-conditional null endogenous lysosomal storage disease gene, wherein the second non-human animal has not been treated with the recombinase.

68. The method of claim 67, wherein the second non-human animal is the same age as the non-human animal in step (a).

69. The method of any one of claims 57-68, wherein step (b) further comprises assessing the phenotype of the lysosomal storage disease after a defined time period post-treatment relative to a wild type non-human animal.

70. The method of claim 69, wherein the wild type non-human animal is the same age as the non-human animal in step (b).

71. The method of any one of claims 57-70, wherein the defined time period post-treatment in step (b) is at least 1 week, at least 1 month, or at least 3 months after treatment.

72. The method any one of claims 57-71, wherein the defined time period post-treatment in step (b) is between about 1 month and about 3 months after treatment.

73. The method of any one of claims 57-72, wherein the lysosomal storage disease gene is a mucopolysaccharidosis gene, and the phenotype is a mucopolysaccharidosis phenotype.

74. The method of any one of claims 57-73, wherein the lysosomal storage disease gene is Arsb, and the phenotype is a mucopolysaccharidosis VI phenotype.

75. The method of claim 74, wherein the phenotype is a skeletal mucopolysaccharidosis VI phenotype.

76. The method of claim 74 or 75, wherein the phenotype comprises, relative to a wild type non-human animal:
(i) increased accumulation of glycosaminoglycans in the liver;
(ii) increased accumulation of glycosaminoglycans in the heart;
(iii) increased accumulation of glycosaminoglycans in the kidney;
(iv) decreased tibia length;
(v) decreased spinal column length;
(vi) increased tibial growth plate width; or
(vii) decreased cranial length:width ratio.

77. The method of any one of claims 74-76, wherein the phenotype comprises the decreased tibia length, the decreased spinal column length, the increased tibial growth plate width, or the decreased cranial length:width ratio.

78. The method of any one of claims 57-73, wherein the lysosomal storage disease gene is Idua, and the phenotype is a mucopolysaccharidosis I phenotype.

79. The method of claim 78, wherein the phenotype is a skeletal mucopolysaccharidosis I phenotype.

80. The method of claim 78 or 79, wherein the phenotype comprises, relative to a wild type non-human animal:
(i) increased accumulation of glycosaminoglycans in the liver;
(ii) increased accumulation of glycosaminoglycans in the heart;
(iii) increased accumulation of glycosaminoglycans in the kidney;
(iv) decreased tibia length;
(v) decreased spinal column length;
(vi) decreased ribcage width; or
(vii) decreased cranial length:width ratio.

81. The method of claim 78, wherein the phenotype is a neurological mucopolysaccharidosis I phenotype.

82. The method of claim 78 or 81, wherein the phenotype comprises, relative to a wild type non-human animal:
(a) decreased exploratory behavior;
(b) decreased anxiety-related behavior;
(c) impaired long-term memory retention; or
(d) increased escape latency.

83. A method of determining an optimal timeframe for treatment of a phenotype of a lysosomal storage disease, comprising:
(a) performing the method of any one of claims 57-82 a first time in a first non-human animal, wherein the first non-human animal is treated with the recombinase at a first time point after birth;
(b) performing the method of step (a) a second time in a second non-human animal, wherein the second non-human animal is treated with the recombinase at a second time point after birth, wherein the second time point is different from the first time point; and
(c) comparing the phenotype in step (a) with the phenotype in step (b) and selecting the time point resulting in the better amelioration of the phenotype.

84. The method of claim 83, wherein the lysosomal storage disease gene is a mucopolysaccharidosis gene, and the phenotype type is a mucopolysaccharidosis phenotype.

85. The method of claim 83 or 84, wherein the lysosomal storage disease gene is Arsb, and the phenotype is a mucopolysaccharidosis VI phenotype.

86. The method of claim 85, wherein the phenotype is a skeletal mucopolysaccharidosis VI phenotype.

87. The method of claim 85 or 86, wherein the phenotype comprises, relative to a wild type non-human animal:
(i) increased accumulation of glycosaminoglycans in the liver;
(ii) increased accumulation of glycosaminoglycans in the heart;
(iii) increased accumulation of glycosaminoglycans in the kidney;
(iv) decreased tibia length;
(v) decreased spinal column length;
(vi) increased tibial growth plate width; or
(vii) decreased cranial length:width ratio.

88. The method of any one of claims 85-87, wherein the phenotype comprises the decreased tibia length, the decreased spinal column length, the increased tibial growth plate width, or the decreased cranial length:width ratio.

89. The method of claim 83 or 84, wherein the lysosomal storage disease gene is Idua, and the phenotype is a mucopolysaccharidosis I phenotype.

90. The method of claim 89, wherein the phenotype is a skeletal mucopolysaccharidosis I phenotype.

91. The method of claim 89 or 90, wherein the phenotype comprises, relative to a wild type non-human animal:
(i) increased accumulation of glycosaminoglycans in the liver;
(ii) increased accumulation of glycosaminoglycans in the heart;
(iii) increased accumulation of glycosaminoglycans in the kidney;
(iv) decreased tibia length;
(v) decreased spinal column length;
(vi) decreased ribcage width; or
(vii) decreased cranial length:width ratio.

92. The method of claim 89, wherein the phenotype is a neurological mucopolysaccharidosis I phenotype.

93. The method of claim 89 or 92, wherein the phenotype comprises, relative to a wild type non-human animal:
(a) decreased exploratory behavior;
(b) decreased anxiety-related behavior;
(c) impaired long-term memory retention; or
(d) increased escape latency.

94. A method of assessing the reversibility of a phenotype of a lysosomal storage disease by a combination therapy, comprising:
(a) performing the method of any one of claims 57-82 a first time in a first non-human animal and a second time in a second non-human animal,
wherein the first non-human animal is treated with the recombinase but not the candidate therapeutic agent, and
wherein the second non-human animal is treated with the recombinase and the candidate therapeutic agent; and
(b) comparing the phenotype in the first non-human animal with the phenotype in the second non-human animal to determine if the combination of the recombinase and the candidate therapeutic agent results in better amelioration of the phenotype.

95. The method of claim 94, wherein the second non-human animal is treated with the recombinase and the candidate therapeutic agent simultaneously.

96. The method of claim 94, wherein the second non-human animal is treated with the recombinase and the candidate therapeutic agent sequentially.

97. The method of any one of claims 94-96, wherein the candidate therapeutic agent is not a protein encoded by the endogenous lysosomal storage disease gene or a nucleic acid encoding the protein.

98. A method of assessing the efficacy of a candidate therapeutic agent for reversing a phenotype of a lysosomal storage disease, comprising:
(a) performing the method of any one of claims 57-82 a first time in a first non-human animal and a second time in a second non-human animal,
wherein the first non-human animal is treated with the recombinase but not the candidate therapeutic agent, and
wherein the second non-human animal is treated with the candidate therapeutic agent but not the recombinase; and
(b) comparing the phenotype in the first non-human animal with the phenotype in the second non-human animal to determine if the recombinase results in better amelioration of the phenotype than the candidate therapeutic agent.

99. The method of claim 98, wherein the recombinase and the candidate therapeutic agent are administered at the same selected time point after birth, and the phenotype is assessed after the same defined time period post-treatment in the first non-human animal and the second non-human animal.

100. The method of claim 98 or 99, wherein the candidate therapeutic agent is a protein encoded by the endogenous lysosomal storage disease gene or a nucleic acid encoding the protein.

101. A method of making the non-human animal of any one of claims 1-52, comprising:
(a) introducing into a non-human animal host embryo a genetically modified non-human animal embryonic stem (ES) cell comprising in its genome the reverse-conditional null endogenous lysosomal storage disease gene; and
(b) gestating the non-human animal host embryo in a surrogate non-human animal mother, wherein the surrogate non-human animal mother produces an F0 progeny genetically modified non-human animal comprising the reverse-conditional null endogenous lysosomal storage disease gene.

102. The method of claim 101, further comprising modifying the non-human animal ES cell prior to step (a) to comprise in its genome the reverse-conditional null endogenous lysosomal storage disease gene.

103. A method of making the non-human animal of any one of claims 1-52, comprising gestating a genetically modified non-human animal host embryo in a non-human animal surrogate mother, wherein the genetically modified non-human animal host embryo comprises in its genome the reverse-conditional null endogenous lysosomal storage disease gene, and wherein the surrogate non-human animal mother produces an F0 progeny genetically modified non-human animal comprising the reverse-conditional null endogenous lysosomal storage disease gene.

104. The method of claim 103, further comprising modifying a non-human animal one-cell stage embryo to generate the genetically modified non-human animal host embryo prior to the gestating step.
